(19) United States
(12) Patent Application Publication
(10) Pub. No.: US 2010/0136039 A1
(43) Pub. Date: Jun. 3, 2010

(54) BORRELIA ANTIGENS

(75) Inventors: Urban Lundberg, Vienna (AT); Andreas Meinke, Pressbaum (AT); Eszter Nagy, Vienna (AT); Alexander von Gabain, Vienna (AT); Birgit Noiges, Vienna (AT); Dieter Gelbmann, Weiden am See (AT); Albina Poljak, Vienna (AT); Christine Triska, Vienna (AT)

Correspondence Address: CLARK & ELBING LLP, 101 FEDERAL STREET, BOSTON, MA, 02110, US

(73) Assignee: Intercell AG, Vienna (AT)

(21) Appl. No.: 12/440,161

(22) PCT Filed: Sep. 14, 2007
(86) PCT No.: PCT/AT07/00439

§ 371 Date: Jul. 21, 2009

(30) Foreign Application Priority Data
Sep. 15, 2006 (EP) 06019384.4

(51) Int. Cl. A61K 39/02; C12N 15/74; C07H 21/00; C12N 1/21; C07K 7/06; C07K 7/08; C07K 14/00; A61K 31/7088; C07K 16/18; C12N 5/16; G01N 33/569; A61K 38/16; A61P 31/04; A61P 37/04

(52) U.S. Cl. 424/190.1; 536/23.1; 435/320.1; 536/23.7; 435/252.31; 530/350; 530/327; 530/328; 530/326; 530/325; 530/324; 514/44 R; 530/387.1; 435/340; 435/7.32; 514/12

(57) ABSTRACT

The present invention relates to isolated nucleic acid molecules which encode a protein, isolated nucleic acid molecules which encode a hyperimmune serum reactive antigen, a vector which comprises such nucleic acid molecule, a host cell comprising such vector, a hyperimmune reactive antigen from Borrelia species, proteins which are preferably hyperimmune serum reactive antigens, hyperimmune serum reactive antigens, antigens, a process for producing such proteins, hyperimmune serum reactive antigens or antigens, a process for producing a cell which expresses such protein, hyperimmune serum reactive antigen or antigen, an antibody binding to such protein, hyperimmune serum reactive antigen or antigen, a hybridoma cell producing such antibody, methods for producing such antibody, a pharmaceutical composition comprising such nucleic acid molecule, protein, hyperimmune serum reactive antigen, antigen or antibody, the use of such nucleic acid molecule, protein, hyperimmune serum reactive antigen, antigen or antibody for the manufacture of a medicament, methods for identifying an antagonist capable of reducing or inhibiting the interaction activity of such protein, hyperimmune serum reactive antigen or antigen, methods for diagnosing an infection and methods for the treatment of an infection. More specifically such proteins, hyperimmune serum reactive antigens or antigens are produced by or associated with bacterial pathogens causing Lyme disease or bacterial infections caused by Borrelia burgdorferi s.l.

[0001] The present invention relates to isolated nucleic acid molecules which encode a protein, isolated nucleic acid molecules which encode a hyperimmune serum reactive antigen, a vector which comprises such nucleic acid molecule, a host cell comprising such vector, a hyperimmune reactive antigen from Borrelia species, proteins which are preferably hyperimmune serum reactive antigens, hyperimmune serum reactive antigens, antigens, a process for producing such proteins, hyperimmune serum reactive antigens or antigens, a process for producing a cell which expresses such protein, hyperimmune serum reactive antigen or antigen, an antibody binding to such protein, hyperimmune serum reactive antigen or antigen, a hybridoma cell producing such antibody, methods for producing such antibody, a pharmaceutical composition comprising such nucleic acid molecule, protein, hyperimmune serum reactive antigen, antigen or antibody, the use of such nucleic acid molecule, protein, hyperimmune serum reactive antigen, antigen or antibody for the manufacture of a medicament, methods for identifying an antagonist capable of reducing or inhibiting the interaction activity of such protein, hyperimmune serum reactive antigen or antigen, methods for diagnosing an infection and methods for the treatment of an infection. More specifically such proteins, hyperimmune serum reactive antigens or antigens are produced by or associated with bacterial pathogens causing Lyme disease or bacterial infections caused by Borrelia burgdorferi s.l.

[0002] Lyme borreliosis, or Lyme disease, is the most commonly reported tick-borne disease in Europe and North America. The disease is caused by the arthropod-borne spirochete Borrelia burgdorferi sensu lato (B. burgdorferi s.l.) and is a multi-systemic infection that can involve multiple organs or tissues, resulting in skin, cardiac, neurological and musculoskeletal disorders. B. burgdorferi s.l. can be divided into 12 genospecies. These 12 genospecies occur in different geographic regions, and live in nature in enzootic cycles involving ticks of the Ixodes ricinus complex (also called Ixodes persulcatus complex) and a wide range of animal hosts (Table A). From these 12 genospecies at least three are pathogenic for humans: Borrelia burgdorferi sensu stricto (B. burgdorferi s.s.), B. afzelii and B. garinii. Two other genospecies, B. lusitaniae and B. valaisiana, have occasionally been detected in humans and their role in Lyme borreliosis are still uncertain.

TABLE A
The B. burgdorferi s.l. genospecies, their tick vectors
and geographic location.

| | Principal tick vector | Location |
|---|---|---|
| Three pathogenic species | | |
| Borrelia burgdorferi s.s. | Ixodes scapularis | North-eastern and |
| | | north central US |
| | Ixodes pacificus | Western US |
| | Ixodes ricinus | Europe |
| Borrelia garinii | Ixodes ricinus | Europe |
| | Ixodes persulcatus | Asia |
| Borrelia afzelii | Ixodes ricinus | Europe |
| | Ixodes persulcatus | Asia |
| Nine minimally | | |
| pathogenic or non- | | |
| pathogenic species | | |
| Borrelia andersonii | Ixodes dentatus | Eastern US |
| Borrelia bissettii | Ixodes spinipalpis | Western US |
| | Ixodes pacificus | |
| Borrelia valaisiana | Ixodes ricinus | Europe and Asia |
| Borrelia lusitaniae | Ixodes ricinus | Europe |
| Borrelia spielmani | Ixodes ricinus | Europe |
| Borrelia japonica | Ixodes ovatus | Japan |
| Borrelia tanukii | Ixodes tanukii | Japan |
| Borrelia turdae | Ixodes turdus | Japan |
| Borrelia sinica | Ixodes persulcatus | China |

[0003] Lyme borreliosis was described as a new clinical entity in 1976. Allen C. Steere investigated a group of people with rashes and swollen joints in Old Lyme, Conn., and misdiagnosed Lyme borreliosis as juvenile rheumatoid arthritis (Steere et al., 1977). The disease has, however, been known in Europe under a variety of names since the 1880' s. In the year 1883, Buchwald described a chronic skin change, which received the name acrodermatitis chronica atrophicans (ACA). In the year 1910 the Swedish physician Afzelius discovered a circularly moving red rash after an insect or tick bite, which received the name erythema migrans (EM). Neurological symptoms after a tick bite were described 1922 by the French researchers Garin and Bujadoux. In 1951 the Swedish clinician Hollström successfully treated patients with EM with penicillin and in 1984 Borrelia cells were observed in skin biopsies taken from an EM lesion. It was suggested that EM in association with meningitis probably was the result of an infection by a tick-borne or an insect-borne bacterium. The causative agent of Lyme borreliosis was finally discovered 1982 by W. Burgdorfer and colleagues, who isolated a previously unidentified spirochetal bacterium from the hard tick Ixodes scapularis that was later named Borrelia burgdorferi (Burgdorfer et al., 1982).

### Epidemiology of Lyme Borreliosis

[0004] Lyme borreliosis is the most common tick-borne zoonosis in Europe and North America. While in most countries it is not a notifiable disease, no exact data are available how many new cases there are per year. In the United States the causative agent is B. burgdorferi s.s. and Lyme borreliosis is localized in north-eastern, mid-Atlantic and upper north-central states. In 2002, a total of 23,763 cases of Lyme borreliosis were reported to CDC, yielding a national incidence of 8.2 cases per 100,000 inhabitants (Lyme Disease Surveillance in Morbidity Mortality Weekly Reports, 2004). B. afzelii and B. garinii are the main causative agents of Lyme borreliosis in Europe together with B. burgdorferi s.s. which contributes to a lesser extent dependent on the geographic location. In Europe the incidence of Lyme borreliosis differs between countries. The average incidence of Lyme borreliosis in Eastern Germany was 17.8 cases per 100,000 population in 2002 and increased by 31% to 23.3 cases in 2003, respectively. In Austria, the incidence of Lyme borreliosis is much higher with 130 cases per 100,000 inhabitants (Report of WHO workshop on Lyme borreliosis and Diagnosis and surveillance, Warsaw, Poland, 20-22 Jun., 1995).

[0005] In some risk groups, such as farmers, forestry workers, hikers, runners or vacationers, seroprevalence and disease incidence rates have increased, as in children under 15 and adults between 39 and 59, without gender preference. The prevalence of Lyme borreliosis varies considerably in different European countries with an overall increased prevalence from west to east. The high incidence of Lyme disease is linked with changes in the forest habitats as well as social factors. An environmental change such as forest fragmentation has led to a loss of rodent predators such as wolves and birds of prey which in turn has led to an increase in the mouse population and automatically to an increase in the tick population. More recently patchy reforestation has increased the numbers of deer and thus the numbers of ticks. Middle class suburban sprawl and the increasing use of these woodland areas for recreation such as camping and hiking has brought humans into greater contact with the larger number of infected ticks. All these parameters contribute to a wider distribution of Lyme borreliosis.

### Etiological Agent of Lyme Borreliosis

[0006] B. burgdorferi s.l. belongs to the family Spirochaetaceae, which is subdivided into the medically important genera Treponema, Leptospira and Borrelia. B. burgdorferi s.l. is a spiral shaped (10-20 μm long and 0.2-0.5 μm wide), vigorously motile, gram negative bacterium that grows under microaerophilic conditions. The spirochetal cell wall consists of a cytoplasmic membrane surrounded by peptidoglycan and flagella and then by a loosely associated outer membrane. The borrelial genome is perhaps the most structurally complex among bacteria and consists of one linear chromosome and a varying number of both linear and circular plasmids (Xu et al., 1995).

[0007] In 1997 the genome of B. burgdorferi s.s. strain B31 was completely sequenced by TIGR (Fraser et al., 1997), and the following analysis showed that the 1.5 Mb genome sequence is encoded in a single chromosome plus a highly dynamic complement of 12 linear and 9 circular plasmids (Casjens et al., 2000). The genomic sequence of the B. garinii strain PBi was published in 2004 (Glöckner et al., 2004). They were only able to assemble two plasmids completely, the remaining plasmids sequence are left as variable plasmid sequences, indicating the complexity and the high content of repetitive sequences. There is a 92% nucleotide sequence identity between the genomes from B. burgdorferi s.s. strain B31 and B. garinii strain PBi, the sequences of the plasmids are more divergent.

[0008] About 90% of the chromosomal genomes comprises coding regions and most of the encoded genes are homologous to genes of known function. They code for proteins involved in DNA replication, transcription and translation; the repair system and recombination; transport, nutrient uptake and energy metabolism; motility and chemotaxis and the regulation of gene expression. Genes related with pathogenicity are primarily located on the extra-chromosomal genome. The genes coding for the synthesis of amino acids, fatty acids, cofactors and nucleotides are absent from the borrelial genome. Therefore Borrelia require a complex medium supplemented with serum, such as BSK-II medium, for growth in vitro.

### Clinical Manifestations of Lyme Borreliosis

[0009] Lyme borreliosis generally occurs in stages, with remission and exacerbations with different clinical manifestation at each stage (Steere, 1989). Early infection stage 1 consists of localized infection of the skin, followed within days or weeks by stage 2, disseminated infection, and months to years later by stage 3, persistent infection. However, the infection is variable; some patients have only localized infections of the skin, while others display only later manifestations of the illness, such as arthritis. Different clinical syndromes of Lyme borreliosis are also caused by infection with diverse B. burgdorferi s.l. species. B. burgdorferi s.s. more often causes joint manifestations (arthritis) and heart problems, B. afzelii causes mainly dermal symptoms (EM and ACA), and B. garinii is mostly responsible for neuroborreliosis.

[0010] Localized infection—The most common symptom of stage 1 of an infection is erythema migrans, which occurs in 70-80% of infected people. This skin lesion is often followed by flu-like symptoms, such as myalgia, arthralgia, headache and fever. These non-specific symptoms occur in 50% of patients with erythema migrans.

[0011] Disseminated infection—During stage 2 the bacteria move into the blood stream from the site of infection and to more distant tissues and organs. Neurological, cardiovascular and arthritic symptoms that occur in this stage include meningitis, cranial neuropathy and intermittent inflammatory arthritis.

[0012] Persistent infection—Stage 3 of the infection is chronic and occurs from months to years after the tick bite. The most common symptom in North America is rheumatoid arthritis, caused by an infection with B. burgdorferi s.s. Persistent infection of the central nervous system with B. garinii causes more severe neurological symptoms during stage 3, and a persistent infection of the skin with B. afzelii results in acrodermatitis chronica atrophicans.

### Diagnosis and Treatment

[0013] The best parameter for diagnosis of early Lyme borreliosis is the characteristic expanding red skin lesion or EM. Unfortunately, 30 percent of patients do not develop this rash, and the usual symptoms of early disease, such as fatigue, fever, or headache, are too non-specific to be diagnostic. Lyme borreliosis in a symptomatic patient can be diagnosed using a variety of serological tests, and the most common diagnostic test is indirect ELISA testing for Lyme specific antibodies in serum.

[0014] Antimicrobial agents are the principle method of treatment of Lyme borreliosis infection. The antibiotic used depends on the stage of the disease, symptoms, and the patient's allergies to medication. The length of the antibiotics course also depends on the stage of the disease and severity of symptoms. Early Lyme borreliosis is typically treated with oral tetracyclines, such as doxycycline, and semi-synthetic penicillins, such as amoxicillin or penicillin V. Arthritic and neurological disorders are treated with high-dose intravenous penicillin G or ceftriaxone.

### Prevention

[0015] The number of cases of Lyme borreliosis steadily increases, as a result of changed ecological conditions. In addition, the difficulty of prevention indicates that the incidence will continue to be a public health concern. Landscape modifications, protective clothing, tick checks or personals protection measures are helpful but not enough, therefore is a vaccine against Lyme borreliosis desirable.

[0016] A vaccine can contain a whole variety of different antigens. Examples of antigens are whole-killed or attenuated organisms, subfractions of these organisms/tissues, proteins, or, in their most simple form, peptides. Antigens can also be recognized by the immune system in form of glycosylated proteins or peptides and may also be or contain polysaccharides or lipids. Short peptides can be used since for example cytotoxic T-cells (CTL) recognize antigens in form of short usually 8-11 amino acids long peptides in conjunction with major histocompatibility complex (MHC). B-cells can recognize linear epitopes as short as 4-5 amino acids, as well as three-dimensional structures (conformational epitopes). In order to obtain sustained, antigen-specific immune responses, adjuvants need to trigger immune cascades that involve all cells of the immune system. Primarily, adjuvants are acting, but are not restricted in their mode of action, on so-called antigen presenting cells (APCs). These cells usually first encounter the antigen(s) followed by presentation of processed or unmodified antigen to immune effector cells. Intermediate cell types may also be involved. Only effector cells with the appropriate specificity are activated in a productive immune response. The adjuvant may also locally retain antigens and co-injected other factors. In addition the adjuvant may act as a chemoattractant for other immune cells or may act locally and/or systemically as a stimulating agent for the immune system.

[0017] There have been concerns to develop an inactivated whole cell vaccine for humans, because of the potential risk that it may induce cross-reactive antibodies to human antigens. Therefore, subunit vaccines are considered to have the greatest potential in preventing Lyme borreliosis.

[0018] Recently, the development of a subunit vaccine to prevent Lyme borreliosis has mainly focused on the outer surface protein A (OspA). The lipidated form of OspA from B. burgdorferi s.s. strain ZS7 together with aluminium hydroxide was commercially developed as LYMErix™ by GlaxoSmithKline (GSK) for the US market. OspA is mainly expressed in the gut of the tick and human immune responses to Borrelia do not usually include humoral or cellular adaptive immunity directed against OspA. Thus, these OspA antibodies produced by vaccination are not used to fight infection in the body. Instead, the antibodies enter the gut of the tick when it takes a blood meal. There, they neutralise the spirochetes and block migration from the midgut to the salivary glands that allows B. burgdorferi s.l. to enter the vertebrate host. Thus, the vaccine prevents transmission of the spirochete from the tick to the human host. Three doses of LYMErix™ were needed for optimal protection in the period of one year, and after the first two doses vaccine efficacy against Lyme borreliosis was 49%, and after the third dose 76%. However, shortly after LYMErix™ was commercially available, it was withdrawn from the market in 2002. Some of the reasons are the need for booster injections every year or every other year, relatively high cost of this preventive approach compared with antibiotic treatment of early infection. In addition, there was a theoretical and never proven concern that LYMErix™ could cause autoimmune reactions in a subgroup of the population.

[0019] The problem underlying the present invention was to provide means for the development of medicaments such as vaccines against bacterial pathogens causing Lyme borreliosis. More particularly, the problem was to provide an efficient, relevant and comprehensive set of nucleic acid molecules, proteins, hyperimmune serum reactive antigens or antigens from B. burgdorferi s.l. that can be used for the manufacture of said medicaments. A still further problem was to provide methods and means for producing a protein, an hyperimmune reactive antigen or an antigen, or a fragment thereof, for identifying an antagonist capable of reducing or inhibiting the interaction activity of such protein, hyperimmune reactive antigen or antigen with an interaction partner thereof and preferably an antibody directed thereagainst, for treating infections, for immunizing an animal or man.

[0020] The problem underlying the present invention is solved in a first aspect by an isolated nucleic acid molecule encoding a protein, preferably a hyperimmune serum reactive antigen, or a fragment thereof, comprising a nucleic acid sequence, which is selected from the group consisting of:
[0021] a) a nucleic acid molecule having at least 70% sequence identity to a nucleic acid molecule having a nucleotide sequence selected from the group comprising Seq ID Nos 1 to 134,
[0022] b) a nucleic acid molecule which is complementary to the nucleic acid molecule of a),
[0023] c) a nucleic acid molecule comprising at least 15 sequential bases of the nucleic acid molecule of a) or b),
[0024] d) a nucleic acid molecule which anneals under stringent hybridisation conditions to the nucleic acid molecule of a), b), or c),
[0025] e) a nucleic acid molecule which, but for the degeneracy of the genetic code, would hybridise to the nucleic acid molecule defined in a), b), c) or d).

[0026] The problem underlying the present invention is solved in a second aspect by an isolated nucleic acid molecule encoding a hyperimmune serum reactive antigen, or a fragment thereof, comprising a nucleic acid sequence, which is selected from the group consisting of:
[0027] a) a nucleic acid molecule having at least 70% sequence identity to a nucleic acid molecule having a nucleotide sequence selected from the group comprising Seq ID Nos 269 to 387 and 507 to 628,
[0028] b) a nucleic acid molecule which is complementary to the nucleic acid molecule of a),
[0029] c) a nucleic acid molecule comprising at least 15 sequential bases of the nucleic acid molecule of a) or b),
[0030] d) a nucleic acid molecule which anneals under stringent hybridisation conditions to the nucleic acid molecule of a), b), or c),
[0031] e) a nucleic acid molecule which, but for the degeneracy of the genetic code, would hybridise to the nucleic acid molecule defined in a), b), c) or d).

[0032] In an embodiment of the first and the second aspect the sequence identity is at least 70%, at least 85%, at least 90%, at least 95% or 100%.

[0033] In an embodiment of the first and the second aspect the nucleic acid is DNA.

[0034] In an alternative embodiment of the first and the second aspect the nucleic acid is RNA.

[0035] In an embodiment of the first and the second aspect the nucleic acid molecule is isolated from a genomic DNA, preferably from a species selected from the group comprising Borrelia burgdorferi s.s., Borrelia garinii, Borrelia afzelii, Borrelia andersonii, Borrelia bissettii, Borrelia valaisiana, Borrelia lusitaniae, Borrelia spielmani, Borrelia japonica, Borrelia tanukii, Borrelia turdae and Borrelia sinica, and more preferably from Borrelia burgdorferi s.s., Borrelia afzelii or Borrelia garinii genomic DNA.

[0036] In an embodiment of the first and the second aspect the fragment is a functional or an active fragment or an active variant thereof.

[0037] In an embodiment of the first and the second aspect the protein or the hyperimmune serum reactive antigen, or fragment thereof, is or consists of an antigen from Borrelia burgdorferi s.s., Borrelia garinii, Borrelia afzelii, Borrelia andersonii, Borrelia bissettii, Borrelia valaisiana, Borrelia lusitaniae, Borrelia spielmani, Borrelia japonica, Borrelia tanukii, Borrelia turdae or Borrelia sinica, preferably from Borrelia burgdorferi s.s., Borrelia afzelii or Borrelia garinii.

[0038] The problem underlying the present invention is solved in a third aspect by a vector comprising a nucleic acid molecule according to the first or the second aspect.

[0039] In an embodiment of the third aspect the vector is adapted for recombinant expression of a protein, preferably the protein or the hyperimmune serum reactive antigen, or a fragment thereof, encoded by the nucleic acid molecule as defined in the first or the second aspect.

[0040] The problem underlying the present invention is solved in a fourth aspect by a host cell comprising the vector as defined in the third aspect.

[0041] The problem underlying the present invention is solved in a fifth aspect by a hyperimmune serum reactive antigen from Borrelia burgdorferi s.s., Borrelia afzelii or Borrelia garinii that is immunologically reactive with sera from a human having a Borrelia burgdorferi s.s. infection, a Borrelia afzelii infection or a Borrelia garinii infection, or an uninfected healthy human, whereby the hyperimmune serum reactive antigen comprises an isolated peptide from Borrelia burgdorferi s.s., Borrelia afzelii or Borrelia garinii, or a peptide fragment thereof.

[0042] The problem underlying the present invention is solved in a sixth aspect by a protein, preferably a hyperimmune serum reactive antigen, having an amino acid sequence selected from the group comprising Seq ID Nos 135 to 268, or an active fragment or an active variant thereof.

[0043] The problem underlying the present invention is solved in a seventh aspect by a hyperimmune serum reactive antigen having an amino acid sequence selected from the group comprising Seq ID Nos 388 to 506 and 629 to 750, or an active fragment or an active variant thereof.

[0044] In an embodiment of the sixth aspect the protein is encoded by a nucleic acid molecule as defined in the first aspect.

[0045] In an embodiment of the seventh aspect the antigen is encoded by a nucleic acid molecule as defined in the second aspect.

[0046] In an embodiment of the sixth and the seventh aspect the protein or the antigen is or consists of an antigen from Borrelia burgdorferi s.s., Borrelia afzelii or Borrelia garinii.

[0047] In an embodiment of the sixth and seventh aspect the active fragment thereof consists of at least 60%, preferably at least 70%, more preferably at least 80%, still more preferably at least 90%, even more preferably at least 95%, most preferably 99% of the protein or the hyperimmune serum reactive antigen as defined in the sixth and the seventh aspect and more specifically of the protein or hyperimmune serum reactive antigen of any of Seq ID Nos 135 to 268, 388 to 506 or 629 to 750.

[0048] In an embodiment of the sixth and seventh aspect the active variant thereof has at least 50% sequence identity to the hyperimmune serum reactive antigen or the protein, especially at least 60%, preferably at least 70%, more preferably at least 80%, still more preferably at least 90%, even more preferably at least 95%, most preferably 99% sequence identity to said hyperimmune serum reactive antigen or protein as defined in the sixth and the seventh aspect and more specifically to the protein or the hyperimmune serum reactive antigen of any of Seq ID Nos 135 to 268, 388 to 506 or 629 to 750.

[0049] The problem underlying the present invention is solved in an eighth aspect by an antigen, whereby the antigen comprises a core amino acid sequence as indicated in column “Predicted immunogenic aa” and “Location of identified immunogenic region” of Table 1, as indicated in column “aa (start-stop)” of Table 5, as defined by columns “From aa” and “To aa” of Table 6, or as defined by column “Amino acid From-To” of Table 8, whereby more preferably such antigen comprises a core amino acid sequence as follows:

amino acids 6-20, 25-51, 58-83, 94-105, 111-122, 127-135, 141-155, 162-173, 179-186, 188-207, 213-226, 230-248, 253-265, 269-282, 285-291, 367-378, 384-393, 401-425, 453-464, 471-477, 504-514, 519-527, 532-555, 557-572, 584-598, 609-616, 624-630, 638-645, 648-653, 128-169, 257-336, 339-379 and 91-415 of Seq ID No 135; amino acids 23-31, 47-53, 57-64, 74-89, 91-106, 127-132, 137-144, 152-157, 164-169, 186-192, 201-206, 208-217, 223-235 and 180-189 of Seq ID No 136; amino acids 4-32, 43-52, 54-66, 78-88, 91-122, 124-131, 144-150, 153-159, 161-178, 183-191, 195-201, 205-215, 236-252, 258-263, 276-284, 288-294, 302-312 and 159-213 of Seq ID No 137; amino acids 8-23, 30-35, 44-54, 65-73, 77-83, 89-110, 117-129, 132-137, 156-165, 169-175, 189-199, 225-237 and 229-267 of Seq ID No 138; amino acids 5-31, 40-50, 52-58, 64-72, 112-118, 137-142, 170-175, 179-185, 192-201, 299-305 and 138-187 of Seq ID No 139; amino acids 11-18, 23-47, 113-119, 131-137, 143-149, 197-203, 215-222, 247-256, 264-290, 298-303, 311-358, 368-401, 403-409 and 97-177 of Seq ID No 140; amino acids 5-20, 27-32, 34-40, 43-64, 66-72, 78-85, 91-97, 104-110, 118-141 and 94-119 of Seq ID No 141; amino acids 5-22, 25-32, 39-45, 51-58, 60-104, 106-114, 129-155, 160-166, 174-182, 195-204, 207-213, 223-239, 243-250, 257-267, 270-276, 279-285, 293-302, 304-317, 328-335, 360-372, 374-382, 386-397, 404-418, 429-438, 441-447, 450-460, 467-472, 480-497, 501-507, 515-521, 562-572 and 195-228 of Seq ID No 142; amino acids 4-10, 31-42, 44-59, 65-72, 75-115, 119-127, 146-155, 181-188, 198-207, 213-219, 228-244, 254-264, 269-293, 295-310, 313-321, 323-336, 350-369, 380-389 and 165-214 of Seq ID No 143; amino acids 11-25, 27-45, 66-73, 75-85, 104-113, 126-135, 143-154, 160-166, 178-185, 201-215, 231-245, 254-261, 266-296, 298-306, 308-332, 339-344, 360-370, 385-391, 412-419, 449-457, 461-469, 472-478, 495-505, 511-518 and 350-451 of Seq ID No 144; amino acids 14-35, 64-72, 81-87, 90-99, 110-116, 137-152, 158-166, 171-178, 207-216, 225-232, 239-250, 264-271, 276-286, 316-323, 325-343, 350-356, 393-407, 416-422, 440-445, 448-453, 469-475, 497-506, 509-529, 537-543, 586-592, 603-610, 41-107 and 528-596 of Seq ID No 145; amino acids 56-62, 83-96, 161-167, 170-179, 184-197, 205-214, 235-243, 285-296, 302-308, 324-333 and 18-315 of Seq ID No 146; amino acids 4-11, 35-41, 57-65, 82-88, 99-115, 118-124, 126-134, 146-151, 159-167, 174-180, 187-192, 195-206, 216-222, 237-247, 261-269, 295-304, 327-334, 341-347, 363-374, 382-388, 398-404, 410-424, 430-436, 441-448, 451-461, 473-484, 493-507, 509-522, 528-536, 544-550, 566-573, 588-604, 608-614, 22-75, 110-148 and 344-404 of Seq ID No 147; amino acids 4-14, 21-28, 32-38, 59-71, 84-106, 110-120, 127-140, 146-167, 184-190, 197-203, 223-232, 249-278, 280-292, 309-324, 342-355, 367-374, 377-384 and 264-328 of Seq ID No 148; amino acids 13-18, 47-55, 65-75, 132-138, 140-146, 149-155, 157-168, 218-227, 241-248, 275-281, 283-289, 306-315, 329-336, 352-360, 372-378, 388-394, 396-404, 411-416, 424-429, 445-455, 479-491, 494-500, 571-578, 583-588, 600-621, 6-65, 68-112, 261-352 and 449-507 of Seq ID No 149; amino acids 10-34, 36-42, 46-55, 58-64, 79-86, 99-122, 125-135, 165-184, 200-209, 215-226, 232-238 and 79-89 of Seq ID No 150; amino acids 4-34, 38-62, 64-78, 87-99, 101-109, 113-125, 128-156, 166-184, 186-193, 196-203, 205-215, 220-226, 236-260, 262-269, 271-288, 296-302, 325-333, 339-350 and 111-138 of Seq ID No 151; amino acids 8-23, 25-33, 57-68, 102-113, 194-199, 236-241, 269-296, 326-333, 339-348, 352-360, 364-369, 378-393, 422-430, 434-447, 476-484, 488-501, 530-538, 542-555, 585-592, 596-609, 638-646, 650-663, 692-699, 706-716, 726-745, 765-771, 792-798, 809-815, 825-835, 862-868, 878-885, 893-902, 911-922, 927-937, 947-953, 962-970, 978-985, 1011-1017, 1027-1034, 1045-1052, 102-177, 285-364, 937-983, 27-246 and 701-1067 of Seq ID No 152; amino acids 4-20, 36-45, 62-69, 73-83, 95-112, 153-166, 178-185, 194-205, 215-223, 238-247 and 80-159 of Seq ID No 153; amino acids 82-95, 107-122, 153-158, 165-171, 178-196, 202-210, 216-222, 270-280, 312-318, 336-341, 381-389 and 245-299 of Seq ID No 154; amino acids 4-23, 45-57, 68-81, 91-104, 118-131, 134-144, 160-166, 172-189, 191-202, 204-217, 228-236, 261-268, 273-285, 287-294, 307-316, 328-343, 350-356, 381-418, 420-429, 440-452, 458-465, 497-504, 528-538, 546-556, 567-574, 580-601, 605-624, 628-639, 647-653 and 126-200 of Seq ID No 155; amino acids 4-19, 24-30, 32-48, 53-80, 89-97, 102-109, 136-142, 145-153, 156-164, 177-187, 192-209, 215-221, 238-243, 15-146 and 21-257 of Seq ID No 156; amino acids 5-13, 70-79, 91-97, 123-129, 155-162, 173-189, 199-224, 232-238, 255-261, 265-283, 290-301, 306-311, 314-320, 336-344, 351-358, 395-409, 412-418, 430-439, 35-109 and 187-298 of Seq ID No 157; amino acids 13-31, 36-47, 80-96, 98-107, 144-149, 187-193, 215-220, 235-251, 291-300, 306-326, 328-338, 340-358, 364-380, 408-426, 434-441 and 220-288 of Seq ID No 158; amino acids 4-24, 36-43, 70-81, 89-100, 109-120, 127-132, 141-158, 165-178, 183-191, 193-202, 208-215 and 31-89 of Seq ID No 159; amino acids 6-25, 44-49, 95-105, 136-144, 199-215, 236-241, 256-262, 280-287, 306-320, 326-334, 346-354, 364-376, 83-172 and 272-327 of Seq ID No 160; amino acids 4-21, 27-44, 85-92, 100-107, 112-118, 142-149, 161-190, 216-222, 231-238, 258-310, 317-323, 334-344, 352-359, 367-373, 380-387, 394-400, 429-441, 485-500, 20-79 and 404-526 of Seq ID No 161; amino acids 12-28, 38-58, 61-75, 98-116, 121-127, 133-142, 169-199, 213-221, 236-241, 243-250, 254-260, 269-281, 284-301, 313-319, 352-358, 362-368, 391-397, 436-448, 455-463, 485-496, 498-511, 523-533, 40-97, 251-297 and 420-488 of Seq ID No 162; amino acids 8-15, 24-41, 50-79, 86-91, 109-141, 143-156, 166-171, 204-212, 235-243, 245-267, 291-311, 328-336, 344-360, 377-388, 390-396 and 258-336 of Seq ID No 163; amino acids 4-15, 22-38, 46-53, 72-82, 99-119, 131-139, 148-154, 179-184, 187-195, 203-209, 212-219, 223-231, 242-249, 257-263, 269-277, 282-288, 310-315, 346-353, 371-377, 388-395, 400-421, 427-438, 445-451 and 458-472 of Seq ID No 164; amino acids 5-29, 37-117, 128-134, 138-144, 146-161, 172-178, 193-219, 221-231, 234-240, 242-261, 263-274, 297-302, 306-322, 339-345, 356-365, 371-383, 402-413, 416-424, 432-443, 447-456, 461-466, 471-524, 532-593 and 197-284 of Seq ID No 165; amino acids 5-29, 54-69, 72-88, 99-112, 128-138, 150-165, 167-174, 181-187, 205-226, 246-253, 273-279, 285-291, 293-311, 313-323, 329-334, 338-350, 356-363, 366-372, 388-394, 397-404, 417-423, 437-445, 453-473 and 378-461 of Seq ID No 166; amino acids 38-45, 67-82, 90-96, 101-108, 113-120, 128-143, 160-173, 190-200, 206-218, 226-237, 244-252, 256-271, 276-285, 298-309, 319-325, 332-350, 355-363, 379-388, 395-404, 412-419, 427-433, 442-455, 82-127 and 212-253 of Seq ID No 167; amino acids 10-28, 37-50, 58-66, 72-91, 101-119, 124-131, 133-149, 152-170, 177-186, 198-204, 225-244, 249-256, 260-266, 269-286, 298-303, 306-312, 329-338, 342-348 and 26-73 of Seq ID No 168; amino acids 10-18, 45-51, 58-87, 95-139, 175-182, 184-194, 228-237, 239-245, 255-261, 269-282, 289-295, 301-308, 310-319, 333-374, 376-383, 394-447, 455-464, 485-503, 519-526, 532-542, 551-557, 571-604, 608-614, 616-623, 654-660, 682-687, 717-724, 729-736, 759-775, 800-806, 817-823, 829-838, 840-864, 877-887, 900-906, 943-951, 959-978, 981-994, 996-1012, 1016-1032, 1035-1046, 1049-1056, 1078-1109, 1117-1124, 1137-1143, 1158-1167, 1179-1199, 1201-1207, 1215-1245, 1250-1256, 1262-1268, 1270-1281, 1298-1310, 1314-1323, 1326-1333, 1347-1357, 1364-1372 and 1053-1082 of Seq ID No 169; amino acids 4-9, 15-27, 29-37, 50-59, 65-73, 94-107, 138-168, 179-187, 191-203, 230-237, 254-260, 267-274, 279-294, 312-328, 355-361, 368-375, 378-388, 405-415, 441-457, 459-467, 469-476, 496-506, 508-514, 521-531, 538-549, 554-561, 566-574, 582-591, 604-625, 640-653, 657-671, 674-689, 698-705, 713-723, 746-756, 763-771, 777-789, 801-809, 822-839, 847-854, 865-872, 877-883, 889-906, 922-940, 943-953, 963-984, 1004-1010, 1021-1037, 1045-1057, 1070-1089, 1096-1115, 1117-1123, 1127-1135 and 194-292 of Seq ID No 170; amino acids 10-30, 38-51, 74-81, 86-96, 116-148, 161-167, 202-208, 211-217, 239-261, 283-295, 298-310, 322-328, 335-346 and 44-99 of Seq ID No 171; amino acids 9-23, 31-42, 50-60, 68-74, 85-92, 98-106, 108-117, 135-142, 144-150, 155-172, 174-191, 193-206, 208-215, 223-233, 237-245, 252-267, 274-296, 308-316, 324-341, 375-385, 394-402, 419-440, 446-452, 493-499, 514-520, 537-546, 570-579, 582-588, 591-603, 609-618, 620-628, 640-687, 700-706, 714-742, 765-774, 794-805, 809-825, 827-838, 847-857, 860-867, 875-888, 897-907, 917-926, 937-942, 950-971, 975-981, 989-999, 1016-1052, 1054-1071, 1089-1105, 1108-1130, 1142-1160, 1166-1178, 1184-1197, 1199-1207, 1216-1222, 1232-1247, 1249-1254, 1262-1283, 1291-1300, 1308-1332, 1343-1356, 1363-1368, 1384-1398, 1401-1410, 1423-1434, 1443-1464, 1478-1484 and 1229-1275 of Seq ID No 172; amino acids 5-15, 21-35, 42-51, 55-60, 73-80, 87-94, 103-110, 134-146, 157-168, 174-188, 190-201, 209-223, 250-257, 110-131 and 179-236 of Seq ID No 173; amino acids 10-24, 30-48, 52-66, 90-100, 111-137, 153-162, 166-175, 184-190, 193-206, 226-232, 238-248, 250-260, 267-273, 322-333, 349-382, 402-413, 421-428, 443-451, 470-480, 487-498, 508-518, 526-539, 544-549, 568-574, 607-623, 631-636 and 372-434 of Seq ID No 174; amino acids 20-28, 33-38, 45-77, 91-110, 124-130, 137-162, 164-170, 175-183, 185-205, 207-217, 235-240, 254-269, 291-296, 319-326, 342-354, 374-381, 397-403, 424-434, 442-455, 469-484, 494-501, 513-522, 529-534, 546-556, 558-564 and 439-464 of Seq ID No 175; amino acids 4-13, 15-21, 24-32, 40-45, 47-65, 75-110, 114-123, 133-142, 144-159, 164-171, 187-215 and 12-77 of Seq ID No 176; amino acids 4-9, 25-44, 49-60, 72-82, 87-105, 125-138, 142-155, 171-179, 183-197, 205-225, 232-244, 256-270, 278-285, 287-293, 310-333, 339-345, 350-366, 368-378, 381-392, 397-404, 408-418 and 281-316 of Seq ID No 177; amino acids 28-35, 95-116, 138-146, 150-158, 174-203 and 33-78 of Seq ID No 178; amino acids 4-23, 31-43, 58-64, 68-83, 93-103, 121-135, 143-156, 181-187, 227-238, 251-264, 292-298, 309-317, 326-333, 351-357, 359-365, 387-395, 400-407, 431-437, 451-460, 462-471, 496-508, 519-526, 534-540, 568-573, 608-618, 620-627, 650-657, 673-679, 690-702, 705-714, 728-734, 738-745, 758-764, 776-782, 795-810, 830-839, 882-904, 911-926, 938-944, 962-969, 975-984, 999-1007, 1019-1025, 1072-1090, 1099-1111, 1172-1178, 1232-1241, 1245-1252, 1257-1266, 1283-1288, 1305-1311, 1370-1377, 1392-1398, 1412-1417, 1422-1434, 1448-1458, 1479-1487, 1529-1534, 1570-1576, 1582-1590, 1615-1622, 1630-1645, 1659-1668, 1700-1708, 1730-1736, 1756-1762, 1765-1776, 1798-1803, 1805-1819, 1831-1837, 1872-1882, 1926-1936, 1946-1952, 1955-1961, 1968-1980, 1995-2002, 2035-2045, 2048-2056, 2076-2083, 2099-2107, 2122-2128, 2146-2156, 718-788 and 399-870 of Seq ID No 179; amino acids 12-19, 22-29, 37-43, 48-56, 79-90, 114-119, 136-147, 162-172, 174-180, 186-194, 200-213, 232-238, 275-282, 288-297, 303-319, 329-338, 341-351, 363-371, 383-397, 416-423, 430-438, 454-472, 476-483, 536-542, 576-581, 626-632, 66-161 and 494-576 of Seq ID No 180; amino acids 29-35, 48-56, 82-89, 106-112, 118-126, 144-149, 157-173, 175-184 and 1-52 of Seq ID No 181; amino acids 14-36, 48-54, 79-85, 149-159, 171-182, 189-205, 211-217 and 171-240 of Seq ID No 182; amino acids 9-23, 30-40, 56-70, 75-80, 97-103, 111-117, 130-135, 139-145, 149-160, 250-256, 276-286, 309-315, 326-331, 364-376, 385-391, 400-412, 429-434, 446-462, 472-498 and 363-430 of Seq ID No 183; amino acids 4-28, 44-60, 73-81, 88-94, 102-108, 119-127, 145-170, 201-208, 220-227, 229-239, 291-297, 306-323, 327-335, 342-369, 372-394, 414-420, 427-445, 456-462, 471-478, 494-503, 505-510, 536-542, 549-567, 585-594, 614-627 and 215-283 of Seq ID No 184; amino acids 4-10, 27-33, 40-48, 64-70, 82-96, 108-115, 123-131, 171-176, 182-204 and 151-160 of Seq ID No 185; amino acids 4-15, 19-36, 39-47, 51-57, 62-69, 77-84, 91-97, 103-112, 117-136, 148-168, 189-195, 204-211, 213-228, 234-243, 268-274, 280-289, 294-308, 314-335, 341-349, 354-375, 382-392, 394-405, 419-424, 430-435, 442-469, 479-489, 500-507, 510-516, 523-534, 536-545, 560-579, 586-592, 614-620, 639-649, 652-663, 665-702, 704-710, 727-732, 743-755, 761-781, 799-805, 810-816, 842-851, 885-891, 904-912, 924-931, 933-946, 948-973, 980-988, 990-1007, 1017-1023, 1027-1035, 1046-1055, 1063-1074, 1086-1091, 1095-1102, 1116-1122, 1149-1158 and 458-497 of Seq ID No 186; amino acids 4-23, 26-32, 50-56, 72-85, 87-104, 106-113, 116-151, 159-174, 176-184, 187-194, 199-206, 211-232, 242-261, 91-170 and 22-264 of Seq ID No 187; amino acids 4-24, 53-58, 65-72, 84-96, 106-113, 115-125, 149-154, 176-191, 215-222, 239-244, 267-275, 278-304, 323-340, 345-351, 416-424, 449-455, 473-483, 523-537, 540-556, 564-583, 605-616, 36-119 and 343-394 of Seq ID No 188; amino acids 11-27, 45-52, 60-74, 96-102, 123-136, 140-155, 167-189, 194-201, 209-230, 254-261, 264-284, 289-294, 297-305, 319-325, 338-343, 349-361, 363-377, 381-388, 396-409, 413-422, 435-441, 455-469 and 342-386 of Seq ID No 189; amino acids 9-45, 47-54, 72-78, 81-96, 111-118, 123-130, 133-143, 148-154, 157-182, 202-215, 241-255, 290-311, 316-334, 340-346, 349-356, 366-385, 387-400, 403-411 and 156-286 of Seq ID No 190; amino acids 26-45, 62-70, 84-121, 129-138, 146-168, 182-188, 197-207, 213-220, 222-229, 246-257, 277-283, 304-314, 328-336, 348-371, 375-385, 388-396, 409-421, 429-438, 451-459, 465-485, 501-528, 530-536, 555-581, 589-594, 607-614, 620-626, 628-634, 637-643, 650-658, 665-671, 680-691, 703-709, 721-742, 746-758, 761-767, 772-777, 784-790, 796-810 and 747-795 of Seq ID No 191; amino acids 4-11, 15-37, 52-66, 79-90, 96-106, 110-118, 124-137, 152-160, 162-171, 174-182, 200-209, 215-222, 227-242, 248-264, 284-308, 325-340, 362-369, 390-418, 420-426, 440-454, 463-471, 478-485, 490-512, 517-532, 539-545, 570-583, 591-605, 621-630, 643-652, 655-665, 684-694, 75-223 and 285-348 of Seq ID No 192; amino acids 8-18, 25-57, 93-107, 121-128, 135-141, 159-176, 183-191, 202-223, 229-236, 298-304, 332-340, 359-368, 384-393, 410-426, 434-439, 444-449, 476-491, 502-508, 511-523, 525-533, 548-554 and 390-409 of Seq ID No 193; amino acids 13-31, 35-41, 50-58, 70-81, 91-100, 120-128, 143-149, 185-191, 196-203, 213-239, 241-251, 256-277, 289-303, 305-316, 364-388, 394-403, 406-412, 417-426, 440-446, 462-469, 494-502, 504-522 and 6-100 of Seq ID No 194; amino acids 7-14, 30-36, 43-52, 54-65, 71-85, 95-101, 113-119, 121-127, 153-170, 179-188, 191-200, 204-210, 214-222, 227-233, 244-250 and 168-223 of Seq ID No 195; amino acids 14-21, 25-39, 54-64, 74-99, 102-129, 139-153, 159-166, 188-206, 214-220, 236-243, 245-255, 262-269, 276-295, 300-309, 315-321, 324-331 and 12-84 of Seq ID No 196; amino acids 4-13, 26-33, 35-49, 55-68, 74-82, 96-114, 116-148, 150-161, 229-235, 237-254, 257-266, 280-286, 305-312, 320-337, 343-356, 373-382, 384-427, 433-439 and 50-64 of Seq ID No 197; amino acids 4-46, 53-78, 103-113, 117-122, 144-149, 168-174, 176-183, 193-200, 207-238, 252-259, 271-277, 279-307, 315-326, 330-391, 412-423, 425-464, 472-478, 508-526, 531-542, 551-560, 562-576, 584-593, 602-608, 616-637, 658-666, 714-719, 721-730, 28-73, 292-344, 531-608 and 391-753 of Seq ID No 198; amino acids 4-21, 26-33, 69-78, 80-93, 109-125, 127-134, 137-146, 154-160, 162-169, 173-182, 189-199, 210-220, 224-242, 246-278, 284-290, 294-308 and 223-272 of Seq ID No 199; amino acids 10-30, 33-42, 46-62, 64-70, 82-97, 112-122, 124-130, 138-145, 148-165, 167-178, 186-192, 196-209, 213-218, 241-249, 258-276, 279-288, 291-299, 302-307, 315-337, 344-349, 360-376, 390-402, 409-415, 417-428, 452-468, 475-484, 486-492 and 180-232 of Seq ID No 200; amino acids 17-24, 32-43, 49-55, 62-69, 78-92, 97-118, 132-139, 148-154, 173-179, 181-189, 191-210 and 117-131 of Seq ID No 201; amino acids 4-18, 35-44, 54-67, 77-85, 92-101, 106-119, 131-144, 146-164, 171-177, 182-191, 203-218, 282-288, 297-310, 343-359, 361-367, 400-405, 433-439, 454-462, 483-492, 496-504, 506-517, 522-529, 552-559, 564-572, 574-580, 590-604, 625-660 and 252-396 of Seq ID No 202; amino acids 33-50, 67-75, 89-95, 107-116, 119-126, 151-158, 165-170, 175-187, 237-243, 252-258, 272-282, 323-332 and 115-166 of Seq ID No 203; amino acids 14-23, 41-53, 63-107, 111-134, 136-155, 179-210, 223-233, 261-267, 285-290, 296-302 and 203-299 of Seq ID No 204; amino acids 22-31, 35-41, 53-62, 64-75, 79-90 and 1-22 of Seq ID No 205; amino acids 4-14, 17-30, 33-44, 54-62, 67-76, 78-97, 112-118, 143-152, 163-169, 175-188, 191-199, 207-216, 232-239, 243-249, 262-268, 289-296, 312-319, 335-340, 1-35 and 183-264 of Seq ID No 206; amino acids 5-18, 37-53, 56-66, 74-81, 100-110, 120-131, 135-141, 150-156, 174-181, 189-196, 202-211, 225-235, 246-251, 255-260, 311-319, 326-332 and 245-332 of Seq ID No 207; amino acids 4-25, 28-34, 41-49, 71-78, 101-120, 125-156, 167-173, 190-199, 207-213, 218-230, 256-267, 269-275, 286-304, 312-320, 341-349, 363-371, 375-384 and 318-384 of Seq ID No 208; amino acids 23-39, 48-58, 60-82, 85-104, 106-112, 117-142, 181-191, 205-213, 219-236, 242-251, 263-276, 295-302, 308-315, 320-330, 335-343, 363-372, 387-392, 413-419, 430-457, 462-470, 477-492, 499-505, 531-540, 542-548, 568-600, 607-614, 620-630 and 36-419 of Seq ID No 209; amino acids 9-50, 60-68, 70-78, 84-100, 105-113, 125-133, 141-153, 186-202, 204-209, 212-219, 236-253, 287-301, 310-317, 319-327, 332-342, 353-358, 364-396, 422-430, 437-459, 484-508, 510-520, 535-543, 573-583, 591-598, 610-621, 629-640, 648-653, 675-685, 691-708, 728-735, 738-745, 750-763, 765-773, 790-797, 799-820, 842-854, 857-864, 880-885, 903-909, 923-933, 939-951, 980-986, 991-998, 1019-1024, 1026-1033, 1045-1051, 1064-1075, 1077-1094, 1100-1115, 1139-1157, 1163-1181, 1196-1202, 1207-1213, 1219-1225, 1241-1250, 1275-1290, 1304-1310, 1332-1347, 1352-1365, 1383-1405, 1421-1429, 1433-1442, 1372-1419 and 979-1467 of Seq ID No 210; amino acids 4-40, 60-65, 90-102, 125-138, 150-160, 162-172 and 14-104 of Seq ID No 211; amino acids 4-31, 37-53, 59-80, 87-93, 173-183, 185-195, 219-233, 239-247, 265-275 and 72-146 of Seq ID No 212; amino acids 5-22, 38-46, 53-58, 69-78, 80-88, 92-99, 117-124, 142-151, 154-165, 189-196, 206-213, 220-226, 288-309, 15-106 and 137-201 of Seq ID No 213; amino acids 4-17, 37-47, 58-66, 75-81, 83-89, 106-116, 145-152, 162-168 and 41-155 of Seq ID No 214; amino acids 4-16, 50-57, 66-72, 92-100, 102-112, 126-150, 156-167, 194-204, 208-218, 244-256 and 165-200 of Seq ID No 215; amino acids 19-26, 38-51, 81-89, 96-103, 107-114, 117-122, 128-134, 150-158, 164-170 and 26-48 of Seq ID No 216; amino acids 5-24, 30-35, 42-47, 74-86, 107-117, 146-156 and 15-92 of Seq ID No 217; amino acids 5-22, 41-49, 55-65, 85-96, 100-106, 111-117, 125-132, 150-155, 161-189, 204-212, 229-243, 262-277, 286-296, 304-311, 314-323, 353-359, 367-373, 391-397, 410-417, 446-451, 485-500, 335-381, 422-484 and 251-528 of Seq ID No 218; amino acids 4-28, 37-43, 65-72, 109-127, 140-148, 155-166, 188-198 and 50-215 of Seq ID No 219; 4-24, 41-55, 71-79, 84-89, 95-100, 113-125, 138-148, 193-203, 215-221, 300-306, 334-350, 362-369, 385-396 and 91-213 of Seq ID No 220; amino acids 4-24, 94-101, 103-112, 128-134, 141-148, 156-165, 172-181, 191-197, 281-290 and 25-76 of Seq ID No 221; amino acids 5-13, 19-25, 27-40, 47-54, 63-69, 84-98, 119-125, 143-158, 170-182, 199-205, 223-234, 237-251, 257-265, 287-292, 296-301, 307-328, 336-352 and 336-362 of Seq ID No 222; amino acids 4-25, 29-36, 41-47, 54-66, 88-95, 97-110, 115-121, 127-135, 164-193, 203-220, 232-244, 269-275, 278-284, 289-316, 320-327, 336-342, 344-353, 355-363, 370-378, 436-442, 449-454, 460-466, 478-489, 492-505 and 311-377 of Seq ID No 223; amino acids 12-34, 40-48, 84-90, 131-138, 140-151, 157-175, 177-187, 193-201, 207-261, 267-281, 306-312, 334-340, 343-349, 352-357, 369-377, 380-394 and 331-386 of Seq ID No 224; amino acids 6-20, 54-73, 97-116, 129-135, 138-149, 173-191, 194-208 and 116-212 of Seq ID No 225; amino acids 11-34, 41-48, 58-72, 82-88, 90-99, 101-109, 137-145, 161-168, 172-188, 193-211, 215-221, 260-269, 271-278, 304-310, 317-327, 336-351 and 208-230 of Seq ID No 226; amino acids 4-13, 20-30, 73-83, 90-107, 117-137, 226-236, 244-260, 268-275, 286-293, 310-317, 324-330, 340-367, 370-379, 390-422, 427-442, 497-505, 507-513, 549-557, 569-576, 585-593, 611-617, 630-638, 647-657, 659-666, 670-675, 689-699, 726-736, 769-774, 779-802, 866-873, 886-894, 934-940, 956-973, 986-992, 1009-1017, 1026-1041, 1043-1050, 1056-1068, 3-48 and 576-739 of Seq ID No 227; amino acids 10-19, 32-40, 42-48, 50-58, 75-85, 88-97, 112-139 and 32-72 of Seq ID No 228; amino acids 4-13, 20-27, 67-80, 92-98, 101-107, 114-123, 153-169, 174-181, 200-206, 213-219, 226-242, 248-254, 256-289, 299-307, 310-316, 320-326, 329-346, 382-392 and 324-391 of Seq ID No 229; amino acids 32-38, 40-47, 49-54, 79-89, 95-101, 110-117, 122-129, 132-140, 151-157, 178-197, 200-206, 216-227, 249-257, 104-143 and 148-195 of Seq ID No 230; amino acids 10-16, 35-47, 52-77, 81-89, 104-109, 115-123, 132-149, 151-160, 163-184, 197-213, 215-245, 252-266, 294-304, 310-337, 342-348, 362-372, 393-398, 408-430, 452-466, 468-476, 485-491, 497-506, 514-520, 530-537, 539-557, 592-606, 627-632, 636-653, 674-688, 693-731, 748-753, 760-766, 783-797, 805-814, 819-825, 833-840, 843-851, 91-135, 282-299 and 445-477 of Seq ID No 231; amino acids 11-22, 25-31, 55-65, 83-107, 111-129 and 130-137 of Seq ID No 232; amino acids 15-21, 24-43, 60-68, 86-95, 157-185, 188-197 and 3-75 of Seq ID No 233; amino acids 13-19, 35-44, 56-73, 79-92, 116-129, 143-158, 169-178, 198-210, 215-221, 238-243, 247-256, 261-267, 270-294, 310-320, 331-341, 360-366, 377-387, 397-406, 412-421, 423-439, 449-455, 458-465, 473-479, 483-492, 510-525, 561-569, 571-597, 599-619, 635-641, 686-704, 712-721, 738-755, 761-767, 781-794, 806-813, 844-857, 862-873, 875-882, 889-896, 901-915, 921-931, 937-943, 963-975, 991-997, 1001-1009, 1025-1032, 1040-1046, 1051-1056, 1073-1080, 1096-1105, 1112-1154, 1163-1170, 1173-1180, 1186-1197, 1203-1208, 1224-1232, 1237-1249, 1254-1261, 400-429 and 521-545 of Seq ID No 234; amino acids 6-30, 81-87, 117-128, 134-142, 147-158, 178-186, 217-227, 246-255 and 61-122 of Seq ID No 235; amino acids 4-22, 31-38, 77-83, 130-137, 159-169, 188-194, 208-229, 231-238, 272-283, 286-294, 308-315, 317-336, 338-347, 8-232 and 265-318 of Seq ID No 236; amino acids 9-23, 26-34, 36-42, 73-94, 113-142, 186-192, 200-221, 232-238, 246-252, 254-279, 292-307, 311-316, 20-62 and 95-181 of Seq ID No 237; amino acids 26-37, 58-67, 83-89, 97-109, 114-141 and 1-76 of Seq ID No 238; amino acids 13-20, 28-35, 70-78, 95-102, 156-169, 171-180 and 121-178 of Seq ID No 239; amino acids 7-20, 32-41, 131-147, 156-166, 219-226, 240-251, 259-270, 275-282, 299-305, 309-315, 336-342, 344-350 and 195-259 of Seq ID No 240; amino acids 7-23, 37-44, 48-63, 93-102, 108-120, 138-145, 219-228, 237-246, 251-270, 277-283, 292-300, 317-323, 336-351, 361-367, 19-124 and 160-232 of Seq ID No 241; amino acids 28-35, 40-47, 93-100, 102-110, 158-182 and 4-77 of Seq ID No 242; amino acids 8-32, 39-44, 104-110, 157-169, 183-196, 212-217 and 42-199 of Seq ID No 243; amino acids 4-18, 49-56, 72-81, 90-107, 127-133, 146-151 and 48-114 of Seq ID No 244; amino acids 4-22, 24-30, 42-53, 57-62, 66-80, 83-90, 99-104, 112-118, 132-148, 168-175, 179-186 and 97-173 of Seq ID No 245; amino acids 7-19, 33-43, 58-77, 85-91 and 14-63 of Seq ID No 246; amino acids 15-21, 24-35, 75-80, 123-128, 133-139, 148-172 and 7-136 of Seq ID No 247; amino acids 29-35, 51-56, 64-74, 82-88, 100-106, 134-153 and 1-44 of Seq ID No 248; amino acids 32-44, 65-72, 75-103, 136-144, 159-166 and 136-185 of Seq ID No 249; amino acids 16-28, 40-53, 74-89, 108-114, 130-140, 152-160, 168-177 and 3-151 of Seq ID No 250; amino acids 5-27, 39-45, 57-65, 72-83, 130-135 and 27-91 of Seq ID No 251; amino acids 16-22, 31-44, 52-67, 79-84, 95-106, 119-127 and 22-78 of Seq ID No 252; amino acids 4-23, 32-39, 45-53, 67-75, 83-89, 97-112, 133-139, 189-194, 200-205, 241-247, 254-259, 275-282, 287-308, 311-316, 329-339, 344-352 and 157-246 of Seq ID No 253; amino acids 4-21, 24-30, 52-77, 81-88, 97-102, 110-115, 125-137 and 70-113 of Seq ID No 254; amino acids 4-20, 33-38, 44-56, 73-81, 123-135, 159-166, 169-181, 199-204 and 13-91 of Seq ID No 255; amino acids 12-18, 23-31, 39-52, 54-60, 63-74, 89-97, 99-111 and 1-66 of Seq ID No 256; amino acids 4-19, 55-62, 76-94, 96-104, 109-126 and 154-166 of Seq ID No 257; amino acids 4-11, 26-39 and 11-19 of Seq ID No 258; amino acids 4-21 and 15-24 of Seq ID No 259; amino acids 12-25 and 23-45 of Seq ID No 260; amino acids 4-23, 33-55, 59-64, 76-93, 107-125, 129-138 and 54-78 of Seq ID No 261; amino acids 4-27, 56-82 and 21-40 of Seq ID No 262; amino acids 8-17, 24-36, 47-61, 76-83 and 65-83 of Seq ID No 263; amino acids 4-22, 37-46, 54-60, 64-70 and 13-25 of Seq ID No 264; amino acids 9-17, 23-41, 64-86, 6-25 and 53-66 of Seq ID No 265; amino acids 4-23, 29-48 and 18-29 of Seq ID No 266; amino acids 9-20, 26-40, 44-51 and 40-60 of Seq ID No 267; amino acids 4-9, 11-18, 20-31 and 4-21 of Seq ID No 268; amino acids 257-278 of Seq ID No 135; amino acids 159-188 and 184-213 of Seq ID No 137; amino acids 230-251 and 247-267 of Seq ID No 138; amino acids 138-164 and 160-187 of Seq ID No 139; amino acids 97-120, 116-139, 135-158 and 154-177 of Seq ID No 140; amino acids 160-187 of Seq ID No 141; amino acids 165-192 and 188-214 of Seq ID No 143; amino acids 350-378 of Seq ID No 144; amino acids 62-86 and 82-106 of Seq ID No 145; amino acids 18-42, 38-62, 78-102, 98-122, 118-142, 138-165, 275-297, 293-315, 185-211, 207-233 and 229-255 of Seq ID No 146; amino acids 22-50, 46-75, 110-131, 127-148, 344-367, 361-384, 382-405 and 401-424 of Seq ID No 147; amino acids 304-328 of Seq ID No 148; amino acids 6-29, 68-92, 88-112, 449-471 and 485-507 of Seq ID No 149; amino acids 937-962, 958-983, 102-130 and 126-154 of Seq ID No 152; amino acids 80-103, 99-122, 118-141 and 137-159 of Seq ID No 153; amino acids 270-299 of Seq ID No 154; amino acids 126-153 and 172-200 of Seq ID No 155; amino acids 15-40, 36-61, 57-82, 78-103 and 99-124 of Seq ID No 156; amino acids 35-63 and 82-109 of Seq ID No 157; amino acids 298-327 of Seq ID No 160; amino acids 20-43, 39-62, 58-79, 354-377, 404-431, 427-453, 449-475, 471-498 and 494-521 of Seq ID No 161; amino acids 40-62, 58-80, 76-97, 251-276, 272-297, 291-316 and 333-358 of Seq ID No 162; amino acids 197-222, 239-264 and 260-284 of Seq ID No 165; amino acids 378-402 and 438-461 of Seq ID No 166; amino acids 82-107, 103-127, 212-235 and 231-253 of Seq ID No 167; amino acids 1053-1082 of Seq ID No 169; amino acids 270-292 of Seq ID No 170; amino acids 44-65, 61-82 and 78-99 of Seq ID No 171; amino acids 1230-1254 of Seq ID No 172; amino acids 110-131 of Seq ID No 173; amino acids 372-395 and 410-434 of Seq ID No 174; amino acids 439-464 of Seq ID No 175; amino acids 52-77 of Seq ID No 176; amino acids 281-300 and 296-316 of Seq ID No 177; amino acids 33-57 and 53-78 of Seq ID No 178; amino acids 718-744, 740-766 and 762-788 of Seq ID No 179; amino acids 66-93, 89-116, 112-139 and 135-161 of Seq ID No 180; amino acids 171-197 of Seq ID No 182; amino acids 102-127, 123-148 and 144-170 of Seq ID No 184; amino acids 91-114 and 110-133 of Seq ID No 187; amino acids 36-60, 56-80, 76-100, 96-119, 343-371 and 367-394 of Seq ID No 188; amino acids 156-183, 179-206, 202-229, 225-252 and 248-274 of Seq ID No 190; amino acids 98-125, 121-148, 144-170, 165-187, 201-223 and 285-309 of Seq ID No 192; amino acids 390-409 of Seq ID No 193; amino acids 6-33, 29-55, 52-79 and 74-100 of Seq ID No 194; amino acids 172-200 and 196-223 of Seq ID No 195; amino acids 12-39, 35-62, 58-84, 156-179 and 175-197 of Seq ID No 196; amino acids 28-53, 49-73, 165-188, 184-207, 203-226, 292-320, 316-344, 531-560, 556-584 and 580-608 of Seq ID No 198; amino acids 200-228 of Seq ID No 200; amino acids 348-374 of Seq ID No 202; amino acids 116-143 and 139-166 of Seq ID No 203; amino acids 203-227 of Seq ID No 204; amino acids 183-208, 204-229 and 225-250 of Seq ID No 206; amino acids 359-384 of Seq ID No 208; amino acids 353-378, 374-399 and 395-419 of Seq ID No 209; amino acids 1372-1398 and 1394-1419 of Seq ID No 210; amino acids 14-38, 34-58 and 54-78 of Seq ID No 211; amino acids 95-122 and 118-146 of Seq ID No 212; amino acids 20-44, 40-64, 60-84, 80-104, 138-162, 158-182 and 178-201 of Seq ID No 213; amino acids 41-67, 63-89, 85-111 and 107-133 of Seq ID No 214; amino acids 165-185 and 181-200 of Seq ID No 215; amino acids 15-44, 40-68 and 64-92 of Seq ID No 217; amino acids 335-360, 356-381, 422-446 and 442-465 of Seq ID No 218; amino acids 50-74, 70-94, 90-114, 110-133, 164-192 and 188-215 of Seq ID No 219; amino acids 91-116, 112-137, 133-158 and 154-179 of Seq ID No 220; amino acids 331-352 of Seq ID No 224; amino acids 116-143, 139-166, 162-189 and 185-212 of Seq ID No 225; amino acids 3-27, 616-640, 636-659, 655-678, 576-598, 594-615, 611-632, 693-718 and 714-739 of Seq ID No 227; amino acids 32-45 of Seq ID No 228; amino acids 112-135, 131-153, 324-349, 345-370 and 366-391 of Seq ID No 229; amino acids 122-143 and 170-195 of Seq ID No 230; amino acids 377-400, 396-419, 91-115 and 111-135 of Seq ID No 231; amino acids 3-27, 23-47, 43-68, 4-30 and 26-52 of Seq ID No 233; amino acids 400-429 and 521-545 of Seq ID No 234; amino acids 61-84, 80-103 and 99-122 of Seq ID No 235; amino acids 8-31, 124-149, 166-191, 207-232, 265-294 and 290-318 of Seq ID No 236; amino acids 20-43, 39-62, 95-122, 117-143, 133-159 and 155-181 of Seq ID No 237; amino acids 1-29 of Seq ID No 238; amino acids 121-143, 139-160 and 156-178 of Seq ID No 239; amino acids 195-219 of Seq ID No 240; amino acids 4-32, 27-54 and 50-77 of Seq ID No 242; amino acids 160-186, 182-208 and 122-149 of Seq ID No 243; amino acids 48-73 and 69-94 of Seq ID No 244; amino acids 151-173 of Seq ID No 245; amino acids 14-41 and 37-63 of Seq ID No 246; amino acids 7-30, 26-49 and 45-69 of Seq ID No 247; amino acids 1-21 and 17-44 of Seq ID No 248; amino acids 43-66 of Seq ID No 250; amino acids 47-71 and 67-91 of Seq ID No 251; amino acids 39-60 and 56-78 of Seq ID No 252; amino acids 199-224 of Seq ID No 253; amino acids 70-94 and 90-113 of Seq ID No 254; amino acids 48-70 of Seq ID No 255; amino acids 1-25, 21-45 and 41-65 of Seq ID No 256; amino acids 27-51 of Seq ID No 257; amino acids 98-125, 144-170, 165-187, 201-223, 285-309, 305-329, 325-348, 400-425, 513-541, 537-564, 560-587 and 583-610 of Seq ID No 192; amino acids 138-164 and 160-187 of Seq ID No 139; amino acids 160-187 of Seq ID No 141; amino acids 350-378, 374-402, 398-426 and 422-451 of Seq ID No 144; amino acids 264-288, 284-308 and 304-328 of Seq ID No 148; amino acids 77-91 of Seq ID No 150; amino acids 111-134 of Seq ID No 151; amino acids 126-153, 149-176 and 172-200 of Seq ID No 155; amino acids 220-245, 241-266 and 262-288 of Seq ID No 158; amino acids 31-53, 49-71 and 67-89 of Seq ID No 159; amino acids 258-280, 276-298, 294-317 and 313-336 of Seq ID No 163; amino acids 458-472 of Seq ID No 164; amino acids 82-107, 103-127, 212-235 and 231-253 of Seq ID No 167; amino acids 26-51 and 47-73 of Seq ID No 168; amino acids 1053-1082 of Seq ID No 169; amino acids 194-217, 213-236, 232-255, 251-274 and 270-292 of Seq ID No 170; amino acids 110-131, 179-201, 197-219 and 215-236 of Seq ID No 173; amino acids 12-36, 32-56 and 52-77 of Seq ID No 176; amino acids 281-300 and 296-316 of Seq ID No 177; amino acids 33-57 and 53-78 of Seq ID No 178; amino acids 171-197, 193-219 and 215-240 of Seq ID No 182; amino acids 363-388, 384-409 and 405-430 of Seq ID No 183; amino acids 102-127, 123-148 and 144-170 of Seq ID No 184; amino acids 149-163 of Seq ID No 185; amino acids 342-366 and 362-386 of Seq ID No 189; amino acids 390-409 of Seq ID No 193; amino acids 50-64 of Seq ID No 197; amino acids 223-249 and 245-272 of Seq ID No 199; amino acids 117-131 of Seq ID No 201; amino acids 116-143 and 139-166 of Seq ID No 203; amino acids 1-21 of Seq ID No 205; amino acids 245-270, 266-291, 287-312 and 308-332 of Seq ID No 207; amino acids 353-378, 374-399 and 395-419 of Seq ID No 209; amino acids 95-122 and 118-146 of Seq ID No 212; amino acids 128-151, 146-169, 314-336, 339-361 and 357-379 of Seq ID No 135; amino acids 159-188 and 184-213 of Seq ID No 137; amino acids 230-251 and 247-267 of Seq ID No 138; amino acids 97-120, 116-139, 135-158 and 154-177 of Seq ID No 140; amino acids 195-228 of Seq ID No 142; amino acids 165-192 and 188-214 of Seq ID No 143; amino acids 6-29, 25-47, 43-65, 68-92, 262-288, 306-331, 326-351, 449-471, 467-489 and 485-507 of Seq ID No 149; amino acids 80-103, 99-122, 118-141 and 137-159 of Seq ID No 153; amino acids 15-40, 36-61, 57-82, 78-103, 99-124 and 120-146 of Seq ID No 156; amino acids 35-63, 59-86, 187-213, 209-235 and 252-277 of Seq ID No 157; amino acids 83-108, 104-129, 125-150, 146-172, 272-302 and 298-327 of Seq ID No 160; amino acids 197-222, 218-243, 239-264 and 260-284 of Seq ID No 165; amino acids 378-402, 398-422, 418-442 and 438-461 of Seq ID No 166; amino acids 44-65, 61-82 and 78-99 of Seq ID No 171; amino acids 1230-1254 and 150-1275 of Seq ID No 172; amino acids 372-395, 391-414 and 410-434 of Seq ID No 174; amino acids 439-464 of Seq ID No 175; amino acids 718-744, 740-766, 762-788, 906-931, 927-951 and 947-971 of Seq ID No 179; amino acids 66-93, 135-161 and 494-518 of Seq ID No 180; amino acids 40-61, 57-79 and 75-97 of Seq ID No 181; amino acids 440-462, 458-480 and 476-497 of Seq ID No 186; amino acids 91-114, 110-133, 129-152 and 148-170 of Seq ID No 187; amino acids 156-183, 179-206, 202-229, 225-252 and 248-274 of Seq ID No 190; amino acids 747-773 and 769-795 of Seq ID No 191; amino acids 6-33, 29-55, 52-79 and 74-100 of Seq ID No 194; amino acids 148-176, 172-200 and 196-223 of Seq ID No 195; amino acids 28-53, 49-73, 165-188, 203-226, 292-320, 316-344 and 531-560 of Seq ID No 198; amino acids 180-208 and 200-228 of Seq ID No 200; amino acids 203-227, 223-247, 243-267 and 263-287 of Seq ID No 204; amino acids 339-363 and 359-384 of Seq ID No 208; amino acids 1372-1398 of Seq ID No 210; amino acids 14-38, 34-58, 74-98 and 94-117 of Seq ID No 211; amino acids 41-67, 63-89 and 129-155 of Seq ID No 214; amino acids 165-185 and 181-200 of Seq ID No 215; amino acids 26-44 of Seq ID No 216; amino acids 15-44, 40-68 and 64-92 of Seq ID No 217; amino acids 90-114, 110-133, 140-168, 164-192 and 188-215 of Seq ID No 219; amino acids 91-116, 112-137, 133-158 and 154-179 of Seq ID No 220; amino acids 311-338, 334-361, 357-385, 381-409 and 405-433 of Seq ID No 223; amino acids 331-352, 348-369 and 365-386 of Seq ID No 224; amino acids 116-143, 139-166, 162-189 and 185-212 of Seq ID No 225; amino acids 208-230 of Seq ID No 226; amino acids 32-45 and 50-72 of Seq ID No 228; amino acids 131-153, 149-172, 324-349, 345-370 and 366-391 of Seq ID No 229; amino acids 104-126, 122-143, 148-174 and 170-195 of Seq ID No 230; amino acids 91-115, 111-135, 377-400, 396-419, 532-553, 548-569, 715-744 and 740-768 of Seq ID No 231; amino acids 3-27, 23-47 and 43-68 of Seq ID No 233; amino acids 118-141, 137-160 and 521-545 of Seq ID No 234; amino acids 4-30, 26-52 and 48-75 of Seq ID No 233; amino acids 61-84, 80-103 and 99-122 of Seq ID No 235; amino acids 20-43, 39-62, 95-122 and 117-143 of Seq ID No 237; amino acids 195-219, 215-239 and 235-259 of Seq ID No 240; amino acids 27-54 of Seq ID No 242; amino acids 197-217 and 213-232 of Seq ID No 241; amino acids 48-73, 69-94 and 90-114 of Seq ID No 244; amino acids 133-159 and 155-181 of Seq ID No 237; amino acids 14-41 and 37-63 of Seq ID No 246; amino acids 29-52 and 48-70 of Seq ID No 255; amino acids 1-29, 24-53 and 49-76 of Seq ID No 238; amino acids 1-21 and 17-44 of Seq ID No 248; amino acids 122-149 and 145-172 of Seq ID No 243; amino acids 3-27, 23-47, 43-66, 62-85, 136-165, 156-185, 81-107 and 103-129 of Seq ID No 249; amino acids 160-186 and 182-208 of Seq ID No 243; amino acids 27-51 and 47-72 of Seq ID No 257; amino acids 177-191 of Seq ID No 136; amino acids 27-51, 47-71 and 67-91 of Seq ID No 251; amino acids 7-30, 26-49, 45-69 and 65-89 of Seq ID No 247; amino acids 126-137 of Seq ID No 232; amino acids 22-43, 39-60 and 56-78 of Seq ID No 252; amino acids 693-718, 714-739, 438-460, 456-477, 473-495, 806-828, 824-846, 616-640, 636-659, 655-678, 674-697, 576-598, 594-615, 611-632, 851-877, 873-898, 731-760, 756-784, 3-27, 23-48, 957-982 and 978-1002 of Seq ID No 227; amino acids 157-182, 178-203, 199-224 and 220-246 of Seq ID No 253; amino acids 70-94 and 90-113 of Seq ID No 254; amino acids 20-44, 40-64, 60-84, 80-104, 138-162, 158-182 and 178-201 of Seq ID No 213; amino acids 1-25, 21-45 and 41-65 of Seq ID No 256; amino acids 121-143, 139-160 and 156-178 of Seq ID No 239; amino acids 12-39, 35-62, 58-84 and 175-197 of Seq ID No 196; amino acids 18-42, 38-62, 58-82, 78-102, 98-122, 118-142, 138-165, 256-279, 275-297, 293-315, 163-189, 185-211, 207-233 and 229-255 of Seq ID No 146; amino acids 46-75, 110-131, 127-148, 188-216, 212-240, 344-367, 361-384, 382-405 and 401-424 of Seq ID No 147; amino acids 151-180, 176-205, 245-274 and 270-299 of Seq ID No 154; amino acids 937-962, 958-983, 102-130, 126-154, 150-177, 823-849, 845-872, 867-892, 285-314, 310-339 and 335-364 of Seq ID No 152; amino acids 97-119, 115-137, 133-155 and 151-173 of Seq ID No 245; amino acids 20-43, 39-62, 58-79, 69-94, 90-115, 167-189, 185-207, 203-224, 296-320, 316-339, 335-358, 354-377, 404-431, 427-453, 449-475, 471-498 and 494-521 of Seq ID No 161; amino acids 40-62, 76-97, 251-276, 272-297, 291-316 and 333-358 of Seq ID No 162; amino acids 335-360, 356-381, 422-446, 442-465 and 461-484 of Seq ID No 218; amino acids 46-69, 65-88, 84-107, 124-149, 186-211, 207-232, 265-294 and 290-318 of Seq ID No 236; amino acids 56-80, 76-100, 96-119, 343-371, 367-394, 410-436 and 432-457 of Seq ID No 188; amino acids 281-307 and 631-654 of Seq ID No 202; amino acids 41-66, 62-86, 82-106, 102-126, 417-444, 440-466, 528-554, 550-575 and 571-596 of Seq ID No 145.

[0050] In an embodiment of the eighth aspect the antigen further consists of
[0051] a) 1 to 50 additional amino acid residue(s), preferably 1 to 40, more preferably 1 to 30, even more preferably at most 1 to 25, still more preferably at most 1 to 10, most preferably 1, 2, 3, 4 or 5 additional amino acid residue(s); and/or
[0052] b) at least one amino acid residue heterologous to the core amino acid sequence.

[0053] In an embodiment of the eighth aspect the amino acid residue(s) is/are flanking the core amino acid sequence C-terminally, N-terminally or C- and N-terminally.

[0054] In an embodiment of the eighth aspect the antigen comprises at least 2, preferably at least 3 core amino acid sequences as defined in the eighth aspect.

[0055] In a further embodiment the antigen, preferably encoded by said nucleic acids of the present invention, is a functional or active fragment and/or a functional or active variant of said antigen. In a still further preferred embodiment the functional or active fragment and/or the functional or active variant is as defined herein.

[0056] The problem underlying the present invention is solved in a ninth aspect by a process for producing a protein, a hyperimmune serum reactive antigen or an antigen, or a fragment thereof, as defined in the fifth, sixth, seventh or eighth aspect, comprising expressing the nucleic acid molecule as defined in the first or the second aspect.

[0057] The problem underlying the present invention is solved in a tenth aspect by a process for producing a cell which expresses a protein, a hyperimmune reactive serum antigen or an antigen, or a fragment thereof, as defined in the fifth, sixth, seventh or eighth aspect comprising transforming or transfecting a suitable host cell with the vector as defined in the third aspect.

[0058] In an embodiment of the ninth and tenth aspect the protein, the hyperimmune reactive serum antigen or the antigen, or the fragment thereof, is a protein, a hyperimmune reactive serum antigen or an antigen, or a fragment thereof, from Borrelia burgdorferi s.s., Borrelia garinii, Borrelia afzelii, Borrelia andersonii, Borrelia bissettii, Borrelia valaisiana, Borrelia lusitaniae, Borrelia spielmani, Borrelia japonica, Borrelia tanukii, Borrelia turdae or Borrelia sinica antigen, preferably from Borrelia burgdorferi s.s., Borrelia afzelii or Borrelia garinii.

[0059] The problem underlying the present invention is solved in an eleventh aspect by a pharmaceutical composition, preferably a vaccine, comprising a protein, a hyperimmune reactive serum antigen or an antigen, or a fragment thereof, as defined in the fifth, sixth, seventh or eighth aspect or a nucleic acid molecule as defined in the first or the second aspect or a vector as defined in the third aspect.

[0060] In a preferred embodiment the pharmaceutical composition of the present invention further comprises an immunostimulatory substance, preferably selected from the group comprising polycationic polymers, more preferably polycationic peptides, immunostimulatory deoxynucleotides (ODNs), peptides containing at least two LysLeuLys motifs, preferably KLKLLLLLKLK, neuroactive compounds, more preferably human growth hormone, alum, Freund's complete or incomplete adjuvants or combinations thereof.

[0061] In a more preferred embodiment of the pharmaceutical composition of the present invention the immunostimulatory substance is a combination of either a polycationic polymer and immunostimulatory deoxynucleotides or of a peptide containing at least two LysLeuLys motifs and immunostimulatory deoxynucleotides.

[0062] In a still more preferred embodiment of the pharmaceutical composition of the present invention the polycationic polymer is a polycationic peptide, especially polyarginine.

[0063] The problem underlying the present invention is solved in a twelfth aspect by the use of a nucleic acid molecule as defined in the first or the second aspect or of a protein, a hyperimmune reactive serum antigen or an antigen, or fragment thereof, as defined in the fifth, sixth, seventh or eighth aspect for the manufacture of a pharmaceutical preparation or medicament, especially for the manufacture of a vaccine against Borrelia burgdorferi s.s., Borrelia garinii, Borrelia afzelii, Borrelia andersonii, Borrelia bissettii, Borrelia valaisiana, Borrelia lusitaniae, Borrelia spielmani, Borrelia japonica, Borrelia tanukii, Borrelia turdae and Borrelia sinica, preferably a vaccine against Borrelia burgdorferi s.s., Borrelia afzelii or Borrelia garinii.

[0064] The problem underlying the present invention is solved in a thirteenth aspect by an antibody, or at least an effective part thereof, which binds to at least a selective part of a protein, a hyperimmune reactive serum antigen or an antigen, or a fragment thereof, preferably an active fragment thereof, or a variant thereof, preferably an active variant thereof, as defined in the fifth, sixth, seventh or eighth aspect.

[0065] In an embodiment of the thirteenth aspect the antibody is a monoclonal antibody.

[0066] In an embodiment of the thirteenth aspect said effective part comprises a Fab fragment, a F(ab) fragment, a F(ab) N fragment, a F (ab)₂ fragment or a Fᵥ fragment.

[0067] In an embodiment of the thirteenth aspect the antibody is a chimeric antibody.

[0068] In an embodiment of the thirteenth aspect the antibody is a humanized antibody.

[0069] The problem underlying the present invention is solved in a fourteenth aspect by a hybridoma cell line, which produces an antibody as defined in the thirteenth aspect.

[0070] The problem underlying the present invention is solved in a fifteenth aspect by a method for producing an antibody as defined in the thirteenth aspect, characterized by the following steps:
[0071] a) initiating an immune response in a non-human animal by administrating a protein, a hyperimmune reactive serum antigen or an antigen, or a fragment thereof, as defined in the fifth, sixth, seventh or eighth aspect, to said animal,
[0072] b) removing an antibody containing body fluid from said animal, and
[0073] c) producing the antibody by subjecting said antibody containing body fluid to further purification steps.

[0074] The problem underlying the present invention is solved in a sixteenth aspect by a method for producing an antibody as defined in the thirteenth aspect, characterized by the following steps:
[0075] a) initiating an immune response in a non-human animal by administrating a protein, a hyperimmune reactive serum antigen or an antigen, or a fragment thereof, as defined in the fifth, sixth, seventh or eighth aspect, to said animal,
[0076] b) removing the spleen or spleen cells from said animal,
[0077] c) producing hybridoma cells of said spleen or spleen cells,
[0078] d) selecting and cloning hybridoma cells specific for said protein, hyperimmune reactive serum antigen or antigen, or a fragment thereof,
[0079] e) producing the antibody by cultivation of said cloned hybridoma cells and optionally further purification steps.

[0080] The problem underlying the present invention is solved in a seventeenth aspect by the use of an antibody as defined in the thirteenth aspect for the preparation of a medicament for treating or preventing infections with Borrelia, preferably pathogenic Borrelia, more preferably Borrelia burgdorferi s.s., Borrelia garinii, Borrelia afzelii, Borrelia andersonii, Borrelia bissettii, Borrelia valaisiana, Borrelia lusitaniae, Borrelia spielmani, Borrelia japonica, Borrelia tanukii, Borrelia turdae and Borrelia sinica, and most preferably with Borrelia burgdorferi s.s., Borrelia afzelii or Borrelia garinii.

[0081] According to another aspect the present invention provides an antagonist, which binds or is capable of binding to a protein, hyperimmune reactive antigen or antigen, or an active fragment or active variant thereof as disclosed in the present invention. According to a still further aspect the antagonist according to the present invention is an antagonist which is capable of reducing or inhibiting the interaction activity of a protein, a hyperimmune serum-reactive antigen or an antigen, or an active fragment thereof or an active variant thereof; according to the present invention to its interaction partner. Such interaction partner is, in a preferred embodiment, an antibody or a receptor, preferably a physiological receptor, of said protein, hyperimmune serum-reactive antigen and/or antigen, or an active fragment thereof or an active variant thereof.

[0082] The problem underlying the present invention is solved in an eighteenth aspect by a method for identifying an antagonist capable of binding to a protein, a hyperimmune reactive serum antigen or an antigen, or a fragment thereof, as defined in the fifth, sixth, seventh or eighth aspect, comprising:
[0083] a) contacting an isolated or immobilized protein, hyperimmune reactive serum antigen or antigen, or a fragment thereof, as defined in the fifth, sixth, seventh or eighth aspect with a candidate antagonist under conditions to permit binding of said candidate antagonist to said protein, hyperimmune reactive serum antigen or antigen, or fragment thereof; in the presence of a component capable of providing a detectable signal in response to the binding of the candidate antagonist to said protein, hyperimmune reactive serum antigen or antigen, or fragment thereof; and
[0084] b) detecting the presence or absence of a signal generated in response to the binding of the antagonist to said protein, hyperimmune reactive serum antigen or antigen, or fragment thereof.

[0085] The problem underlying the present invention is solved in a nineteenth aspect by a method for identifying an antagonist capable of reducing or inhibiting the interaction activity of a protein, a hyperimmune reactive serum antigen or an antigen, or a fragment thereof, according to the fifth, sixth, seventh or eighth aspect to its interaction partner comprising:
[0086] a) providing a protein, a hyperimmune reactive serum antigen or an antigen, or a fragment thereof; as defined in the fifth, sixth, seventh or eighth aspect,
[0087] b) providing an interaction partner to said protein, hyperimmune reactive serum antigen or antigen, or fragment thereof; especially an antibody according to the thirteenth aspect,
[0088] c) allowing interaction of said protein, hyperimmune reactive serum antigen or antigen, or fragment thereof, to said interaction partner to form an interaction complex,
[0089] d) providing a candidate antagonist,
[0090] e) allowing a competition reaction to occur between the candidate antagonist and the interaction complex,
[0091] f) determining whether the candidate antagonist inhibits or reduces the interaction activities of the protein, hyperimmune reactive serum antigen or antigen, or fragment thereof, with the interaction partner.

[0092] The problem underlying the present invention is solved in a twentieth aspect by use of any of the protein, hyperimmune reactive serum antigen or antigen, or a fragment thereof, as defined in the fifth, sixth, seventh or eighth aspect for the isolation and/or purification and/or identification of an interaction partner of said protein, hyperimmune reactive serum antigen or antigen, or fragment thereof.

[0093] The problem underlying the present invention is solved in a twenty-first aspect by a method for diagnosing an infection with a Borrelia organism comprising the steps of:
[0094] a) contacting a sample obtained from a subject with the protein, hyperimmune serum reactive antigen or antigen, or any fragment thereof, as defined in the fifth, sixth, seventh or eighth aspect; and
[0095] b) detecting the presence of an antibody against said Borrelia organism in the sample.

[0096] The problem underlying the present invention is solved in a twenty-second aspect by a method for diagnosing an infection with a Borrelia organism comprising the steps of:
[0097] a) contacting a sample obtained from a subject with a primer or a probe specific for a nucleic acid molecule, or a fragment thereof, as defined in the first or the second aspect; and
[0098] b) detecting the presence of such nucleic acid molecule or fragment thereof in the sample.

[0099] The present invention also provides a process for in vitro diagnosing a disease related to expression of a hyperimmune serum-reactive antigen or a fragment thereof according to the present invention comprising determining the presence of a nucleic acid sequence encoding said hyperimmune serum reactive antigen or fragment thereof according to the present invention or the presence of the hyperimmune serum reactive antigen or fragment thereof according to the present invention.

[0100] The problem underlying the present invention is solved in a twenty-third aspect by a method for diagnosing an infection with a Borrelia organism comprising the steps of:
[0101] a) contacting a sample obtained from a subject with the antibody according to the thirteenth aspect; and
[0102] b) detecting the presence of an antigen of said Borrelia organism in the sample.

[0103] In an embodiment of the twenty-third aspect the antigen of said Borrelia organism is a protein, hyperimmune serum reactive antigen or antigen as defined in the fifth, sixth, seventh or eighth aspect.

[0104] In an embodiment of the twenty-first, twenty-second and twenty-third aspect the Borrelia organism is a pathogenic Borrelia organism, more preferably a Borrelia organism selected from the group comprising Borrelia burgdorferi Borrelia garinii, Borrelia afzelii, Borrelia andersonii, Borrelia bissettii, Borrelia valaisiana, Borrelia lusitaniae, Borrelia spielmani, Borrelia japonica, Borrelia tanukii, Borrelia turdae and Borrelia sinica, and even more preferably selected from the group comprising B. burgdorferi s.s., B. afzelii and B. garinii.

[0105] Moreover, the present invention provides the use of a protein, a hyperimmune serum reactive antigen or an antigen, or a fragment thereof or a variant thereof, as defined in the present invention for the generation of a peptide binding to said protein, hyperimmune serum reactive antigen or antigen, or a fragment thereof or a variant thereof, wherein the peptide is an anticaline.

[0106] The problem underlying the present invention is solved in a twenty-fourth aspect by use of a protein, a hyperimmune reactive serum antigen or an antigen, or fragment thereof, as defined in the fifth, sixth, seventh or eighth aspect for the manufacture of a functional nucleic acid, wherein the functional nucleic acid is selected from the group comprising aptamers and spiegelmers.

[0107] The problem underlying the present invention is solved in a twenty-fifth aspect by use of a nucleic acid molecule as defined in the first or the second aspect for the manufacture of a functional ribonucleic acid, wherein the functional ribonucleic acid is selected from the group comprising ribozymes, antisense nucleic acids and siRNA.

[0108] The problem underlying the present invention is solved in a twenty-sixth aspect by a method for the treatment of a Borrelia infection in an animal or man preferably in need thereof, comprising the step of administering to said animal or man a therapeutically effective amount of a pharmaceutical composition or a medicament as defined in any of the preceding aspects or an antibody as defined in the thirteenth aspect.

[0109] In an embodiment of the twenty-sixth aspect the Borrelia infection is an infection with Borrelia burgdorferi s.s., Borrelia garinii, Borrelia afzelii, Borrelia andersonii, Borrelia bissettii, Borrelia valaisiana, Borrelia lusitaniae, Borrelia spielmani, Borrelia japonica, Borrelia tanukii, Borrelia turdae or Borrelia sinica, preferably Borrelia burgdorferi s.s., Borrelia afzelii or Borrelia garinii.

[0110] The problem underlying the present invention is solved in a twenty-seventh aspect by a method for immunizing an animal or man against infection with a Borrelia organism, comprising the step of administering to said animal or man an effective amount of the protein, the hyperimmune reactive serum antigen or the antigen, or a fragment thereof, as defined in the fifth, sixth, seventh or eighth aspect, or of the nucleic acid molecule as defined in the first or the second aspect or a vector as defined in the third aspect, wherein the effective amount is suitable to elicit an immune response in said animal or man.

[0111] In an embodiment of the twenty-seventh aspect the Borrelia organism is selected from the group comprising Borrelia burgdorferi s.s., Borrelia garinii, Borrelia afzelii, Borrelia andersonii, Borrelia bissettii, Borrelia valaisiana, Borrelia lusitaniae, Borrelia spielmani, Borrelia japonica, Borrelia tanukii, Borrelia turdae and Borrelia sinica, preferably Borrelia burgdorferi s.s., Borrelia afzelii or Borrelia garinii.

[0112] The problem underlying the present invention is solved in a twenty-eighth aspect by a method for stimulating an immune response in an animal or man against a Borrelia organism, comprising the step of administering to said animal or man an effective amount of the protein, the hyperimmune reactive serum antigen or the antigen, or a fragment thereof, as defined in the fifth, sixth, seventh or eighth aspect, or of the nucleic acid molecule as defined in the first or the second aspect or a vector as defined in the third aspect, wherein the effective amount is suitable to stimulate the immune response in said animal or man.

[0113] In an embodiment of the twenty-eighth aspect the Borrelia organism is selected from the group comprising Borrelia burgdorferi s.s., Borrelia garinii, Borrelia afzelii, Borrelia andersonii, Borrelia bissettii, Borrelia valaisiana, Borrelia lusitaniae, Borrelia spielmani, Borrelia japonica, Borrelia tanukii, Borrelia turdae and Borrelia sinica, preferably Borrelia burgdorferi s.s., Borrelia afzelii or Borrelia garinii.

[0114] It is within the present invention that the various methods and uses, respectively, where a protein, a hyperimmune serum reactive antigen or an antigen, as defined in the present invention is used, can also be performed or practiced using a fragment of such protein, hyperimmune serum reactive antigen or antigen, preferably an active fragment thereof, or a variant of such protein, hyperimmune serum reactive antigen or antigen, preferably an active variant thereof, each as preferably described herein. It is also within the present invention that the various kinds of compounds disclosed herein as interacting with or targeting the protein, the hyperimmune serum-reactive antigen and/or the antigen according to the present invention, can additionally or alternatively interact with or target the active fragment or active variant of said protein, hyperimmune serum reactive antigen or antigen.

[0115] It is also within the present invention that each and any method in the practice of which an antibody is used, can, in principle, also be practiced when instead of the antibody the anticalines or the functional nucleic acids as defined herein are used, whereby it is preferred that such functional nucleic acid is selected from the group comprising aptamers and spiegelmers. This applies equally to the various uses of the present application.

[0116] In a preferred embodiment a fragment of a protein, hyperimmune serum reactive antigen or antigen, each as disclosed herein, is a part of such protein, hyperimmune serum reactive antigen or antigen which exhibits at least one feature of such protein, hyperimmune serum reactive antigen or antigen. Preferably such feature is a feature selected from the group comprising treatment of infections, immunization of an animal including man, and stimulation of an immune response in an animal including man.

[0117] It is also within the present invention that any disclosure made herein in relation to Borrelia and more specifically Borrelia burgdorferi s.l. is equally applicable to a Borrelia species, whereby the Borrelia species is preferably selected from the group comprising Borrelia burgdorferi s.s., Borrelia garinii, Borrelia afzelii, Borrelia andersonii, Borrelia bissettii, Borrelia valaisiana, Borrelia lusitaniae, Borrelia spielmani, Borrelia japonica, Borrelia tanukii, Borrelia turdae and Borrelia sinica.

[0118] As preferably used herein the term polypeptide according to the present invention refers in a comprehensive manner to the protein, hyperimmune serum reactive antigen or antigen according to the present invention, including each and any variant, fragment, analogue or derivative thereof, particularly as described herein. Insofar, whenever the term polypeptide is used herein, and if not explicitly stated otherwise, the respective disclosure is also made for or in relation to any protein, hyperimmune serum reactive antigen or antigen according to the present invention, including each and any variant, fragment, analogue or derivative thereof, particularly as described herein. Also it is to be understood that any use or aspect described in connection with any of the above mentioned compounds covered by the term polypeptide according to the present invention shall be applicable also to each and any other of the above mentioned compounds covered by the term polypeptide according to the present invention.

[0119] The present invention advantageously provides an efficient, relevant and comprehensive set of isolated nucleic acid molecules and proteins, hyperimmune reactive antigens or antigens encoded by them, including the active fragments and the active variants thereof, using an antibody preparation from multiple human plasma pools and surface expression libraries derived from the genome of B. burgdorferi s.l. Thus, the present invention fulfils a widely felt demand for B. burgdorferi s.l. antigens, vaccines, diagnostics and products useful in procedures for preparing antibodies and for identifying compounds effective against infections caused by pathogenic Borrelia species, preferably the Borrelia species described in Table A herein, more preferably B. burgdorferi s.s., B. afzelii or B. garinii.

[0120] An effective vaccine should be composed of proteins or polypeptides, which are expressed by all strains and are able to induce high affinity, abundant antibodies against cell surface components of said pathogenic Borrelia species, including B. burgdorferi s.s., B. afzelii or B. garinii. The antibodies should be IgG1 and/or IgG3 for opsonization, and any IgG subtype for neutralisation of adherence and toxin action. A chemically defined vaccine must be definitely superior compared to a whole cell vaccine (attenuated or killed), since components of said pathogenic Borrelia species, including B. burgdorferi s.s., B. afzelii or B. garinii, which cross-react with human tissues or inhibit opsonization can be eliminated, and the individual proteins inducing protective antibodies and/or a protective immune response can be selected.

[0121] In a preferred embodiment of the present invention, the nucleic acid molecules exhibit 70% identity over their entire length to a nucleotide sequence set forth in Seq ID Nos 1 to 134, 269 to 387 or 507 to 628. More preferred are nucleic acids that comprise a region that is at least 80% or at least 85% identical over their entire length to a nucleic acid molecule set forth in Seq ID Nos 1 to 134, 269 to 387 or 507 to 628. In this regard, nucleic acid molecules at least 90%, 91%, 92%, 93%, 94%, 95%, or 96% identical over their entire length to the same are particularly preferred. Furthermore, those with at least 97% are highly preferred, those with at least 98% and at least 99% are particularly highly preferred, with at least 99% or 99.5% being the more preferred, with 100% identity being especially preferred. Moreover, preferred embodiments in this respect are nucleic acids, which encode proteins, hyperimmune serum reactive antigens or antigens, or fragments thereof (polypeptides) which retain substantially the same biological function or activity as the mature polypeptide encoded by said nucleic acids set forth in the Seq ID Nos 135 to 268, 388 to 506 or 629 to 750. It is also within the present invention that the nucleic acid molecules according to the present invention are coding for a protein which is preferably a hyperimmune serum reactive antigen or an antigen. Still further it is within the present invention that the molecules encoded by Seq ID Nos 135 to 268, 388 to 506 or 629 to 750 are proteins, which are preferably antigens or hyperimmune serum reactive antigens.

[0122] Identity, as known in the art and used herein, is the relationship between two or more polypeptide sequences or two or more polynucleotide sequences, as determined by comparing the sequences. In the art, identity also means the degree of sequence relatedness between polypeptide or polynucleotide sequences, as the case may be, as determined by the match between strings of such sequences. Identity can be readily calculated. While there exist a number of methods to measure identity between two polynucleotide or two polypeptide sequences, the term is well known to skilled artisans (e.g. Sequence Analysis in Molecular Biology, von Heinje, G., Academic Press, 1987). Preferred methods to determine identity are designed to give the largest match between the sequences tested. Methods to determine identity are codified in computer programs. Preferred computer program methods to determine identity between two sequences include, but are not limited to, GCG program package (Devereux, J. et al., 1984), BLASTP, BLASTN, and FASTA (Altschul, S. et al., 1990).

[0123] The nucleic acid molecules according to the present invention can, as a second alternative to the nucleic acid molecules described herein by reference to Seq ID Nos, the description of which is also referred to herein as first alternative, also be nucleic acid molecules, which are at least essentially complementary to the nucleic acids described in accordance with the first alternative herein. It will be acknowledged by the ones skilled in the art that an individual nucleic acid molecule is at least essentially complementary to another individual nucleic acid molecule. As used herein complementary means that a nucleic acid strand is base pairing via Watson-Crick base pairing with a second nucleic acid strand. Essentially complementary as used herein means that the base pairing is not occurring for all of the bases of the respective strands but leaves a certain number or percentage of the bases unpaired or wrongly paired. The percentage of correctly pairing bases is preferably at least 70%, more preferably 80%, even more preferably 90% and most preferably any percentage higher than 90%. Such higher percentage includes 91, 92, 93, 94, 95, 96, 97, 98, 99 and 100%, whereby such definition is applicable to each aspect of the present application where this kind of terminology is used. It is to be noted that a percentage of 70% matching bases is considered as homology and the hybridisation having this extent of matching base pairs is considered as stringent. Hybridisation conditions for this kind of stringent hybridisation may be taken from Current Protocols in Molecular Biology (John Wiley and Sons, Inc., 1987). More particularly, the hybridisation conditions can be as follows:
[0124] a) Hybridisation performed e.g. in 5×SSPE, 5×Denhardt's reagent, 0.1% SDS, 100 g/mL sheared DNA at 68° C.
[0125] b) Moderate stringency wash in 0.2×SSC, 0.1% SDS at 42° C.
[0126] c) High stringency wash in 0.1×SSC, 0.1% SDS at 68° C.

[0127] Genomic DNA with a GC content of 50% has an approximate T_{M} of 96° C. For 1% mismatch, the T_{M} is reduced by approximately 1° C.

[0128] In addition, any of the further hybridisation conditions described herein are in principle applicable as well.

[0129] Of course, all nucleic acid sequence molecules which encode the same polypeptide molecule as those identified by the present invention are encompassed by any disclosure of a given coding sequence, since the degeneracy of the genetic code is directly applicable to unambiguously determine all possible nucleic acid molecules which encode a given polypeptide molecule, even if the number of such degenerated nucleic acid molecules may be high. This is also applicable for active fragments or active variants of a given polypeptide, protein, hyperimmune serum reactive antigen or antigen, as long as the fragments or variant encode a polypeptide, protein, hyperimmune serum reactive antigen or antigen being suitable to be used such that the same effect can be obtained as if the full-length polypeptide, protein, hyperimmune serum reactive antigen or antigen was used, preferably may be used in a vaccination connection, e.g. as an active or passive vaccine.

[0130] The nucleic acid molecule according to the present invention can, as a third alternative, also be a nucleic acid which comprises a stretch of at least 15 bases of the nucleic acid molecule according to the first or second alternative of the nucleic acid molecules according to the present invention as outlined above. Preferably, the bases form a contiguous stretch of bases. However, it is also within the scope of the present invention that the stretch consists of two or more moieties, which are separated by a number of bases.

[0131] The nucleic acid molecules according to the present invention may preferably consist of at least 20, even more preferred at least 30, especially at least 50 contiguous bases from the sequences disclosed herein. The suitable length may easily be optimized due to the intended field of use (e.g. as (PCR) primers, probes, capture molecules (e.g. on a (DNA) chip), etc.). Preferred nucleic acid molecules contain at least a contiguous 15 base portion of one or more of the immunogenic amino acid sequences listed in tables 1, 5 and 6. Specifically preferred are nucleic acids containing a contiguous portion of a DNA sequence of any sequence contained in the sequence protocol of the present application which shows 1 or more, preferably more than 2, especially more than 5, non-identical nucleic acid residues compared to the B. burgdorferi s.s. and B. garinii genomes and plasmids as specified in the following by their NCBI accession numbers and plasmid designation (variable plasmid segments; VPS):

B. burgdorferi s.s. (B31), NC_{—}001318 (linear chromosome), NC_{—}000957 (lp5), NC_{—}000956 (lp56), NC_{—}000953 (cp32-8), NC_{—}000952 (cp32-7), NC_{—}000951 (cp32-6), NC_{—}000950 (cp32-4), NC_{—}000949 (cp32-3), NC_{—}000948 (cp32-1), NC_{—}000955 (lp21), NC_{—}000954 (cp32-9), NC_{—}001904 (cp9), NC_{—}001903 (cp26), NC_{—}001851 (lp28-1), NC_{—}001857 (lp54), NC_{—}001856 (lp38), NC_{—}001855 (lp36), NC_{—}001854 (lp28-4), NC_{—}001853 (lp28-3), NC_{—}001852 (lp28-2), NC 001850 (lp25), NC 001849 (lp17);
B. garinii (PBi), NC_{—}006156 (linear chromosome), NC_{—}006128 (cp26), NC 006129 (lp54), NT_{—}108263 (VPS G11a15f12.s1), NT_{—}108262 (VPS G1M1b11b03.s1), NT_{—}108261 (VPS G1M1b15c06.r1), NT_{—}108260 (VPS G11a14d08.s1), NT_{—}108259 (VPS PBi11a03e01.s1), NT_{—}108258 (VPS G1a13d03.r1), NT_{—}108257 (VPS G1Mb19g09.r1), NT_{—}108256 (VPS G11a19d04.r1), NT_{—}108255 (VPS G1a13d06.s1), NT_{—}108254 (VPS G1a18e10.s1), NT_{—}108253 (VPS G1a22b07.r1), NT_{—}108252 (VPS G11a15h12.r1), NT_{—}108251 (VPS G1a18d09.s1), NT_{—}108250 (VPS G1a07g11.r1), NT_{—}108249 (VPS G1Mb28a10.r1), NT_{—}108248 (VPS G1a23g09.r1), NT_{—}108247 (VPS PBi1M1b05c04.r1), NT_{—}108246 (VPS G1M1b09a03.r1), NT_{—}108245 (VPS G1a10e03.r1), NT_{—}108244 (VPS G1Mb12b07.s1), NT_{—}108243 (VPS G1a25a05.r1), NT_{—}108242 (VPS G11a16g12.s1), NT_{—}108241 (VPS G11a 14a06.r1), NT_{—}108240 (VPS G1a34d11.r1), NT_{—}108239 (VPS G1a19c04.r1), NT_{—}108238 (VPS G1Mb03b12.r1), NT_{—}108237 (VPS G11a16d07.r1), NT_{—}108236 (VPS G1a09h07.r1), NT_{—}108235 (VPS G1a07d05.r1), NT_{—}108234 (VPS G1M1b07c12.s1), NT_{—}108233 (VPS G11a15e03.s1), NT_{—}108232 (VPS G1M1b09g01.s1), NT_{—}108231 (VPS G1a34h09.s1), NT_{—}108230 (VPS G1a08d08.s1), NT_{—}108229 (VPS G1M1b13a11.r1), NT_{—}108228 (VPS G11a17h03.s1, NT_{—}108227 (VPS G1a19d06.s1).

[0132] Specifically preferred non-identical nucleic acid residues are residues, which lead to a non-identical amino acid residue. Preferably, the nucleic acid sequences encode polypeptides, proteins, hyperimmune serum reactive antigens or antigens having at least 1, preferably at least 2, preferably at least 3 different amino acid residues compared to the published or listed B. burgdorferi s.l. counterparts mentioned above. Preferably, this kind of polypeptides, proteins, hyperimmune serum reactive antigens or antigens still has at least one of the characteristics of the molecules disclosed herein having identical amino acid residues. Also such isolated polypeptides, being fragments of the proteins (or the whole protein), hyperimmune serum reactive antigens or antigens disclosed herein e.g. in the sequence listing, having at least 6, 7, or 8 amino acid residues and being encoded by these nucleic acids, are preferred.

[0133] The nucleic acid molecule according to the present invention can, as a fourth alternative, also be a nucleic acid molecule which anneals under stringent hybridisation conditions to any of the nucleic acids of the present invention according to the first, second, or third alternative as disclosed herein. Stringent hybridisation conditions are typically those described herein.

[0134] Finally, the nucleic acid molecule according to the present invention can, as a fifth alternative, also be a nucleic acid molecule which, but for the degeneracy of the genetic code, would hybridise to any of the nucleic acid molecules of the present invention according to the first, second, third, and fourth alternative as outlined herein. This kind of nucleic acid molecule refers to the fact that preferably the nucleic acids according to the present invention code for the protein, hyperimmune serum reactive antigens or antigen, or fragments thereof or variants thereof, according to the present invention. This kind of nucleic acid molecule is particularly useful in the detection of a nucleic acid molecule according to the present invention and thus the diagnosis of the respective microorganisms such as B. burgdorferi s.s. or any pathogenic Borrelia species, particularly those pathogenic Borrelia species disclosed herein, and any disease or, diseased condition where these kinds of microorganism are involved, which preferably is that such mircoorganism is causing directly or indirectly, such as an opportunistic microorganism such disease or diseased condition. Preferably, the hybridisation could occur or be preformed under stringent conditions as described in connection with the fourth alternative described herein.

[0135] Nucleic acid molecule as used herein generally refers to any ribonucleic acid molecule or deoxyribonucleic acid molecule, which may be unmodified RNA or DNA or modified RNA or DNA. Thus, for instance, nucleic acid molecule as used herein refers to, among other, single- and double-stranded DNA, DNA that is a mixture of single- and double-stranded RNA, and RNA that is a mixture of single- and double-stranded regions, hybrid molecules comprising DNA and RNA that may be single-stranded or, more typically, double-stranded, or triple-stranded, or a mixture of single- and double-stranded regions. In addition, nucleic acid molecule as used herein refers to triple-stranded regions comprising RNA or DNA or both RNA and DNA. The strands in such regions may be from the same molecule or from different molecules. The regions may include all of one or more of the molecules, but more typically involve only a region of some of the molecules. One of the molecules of a triple-helical region often is an oligonucleotide. As used herein, the term nucleic acid molecule includes DNAs or RNAs as described above that contain one or more modified bases. Thus, DNAs or RNAs with backbones modified for stability or for other reasons are “nucleic acid molecule” as that term is intended herein. Moreover, DNAs or RNAs comprising unusual bases, such as inosine, or modified bases, such as tritylated bases, to name just two examples, are nucleic acid molecule as the term is used herein. It will be appreciated that a great variety of modifications have been made to DNA and RNA that serve many useful purposes known to those of skill in the art. The term nucleic acid molecule as it is employed herein embraces such chemically, enzymatically or metabolically modified forms of nucleic acid molecule, as well as the chemical forms of DNA and RNA characteristic of viruses and cells, including simple and complex cells, inter alia. The term nucleic acid molecule also embraces short nucleic acid molecules often referred to as oligonucleotide(s). “Polynucleotide” and “nucleic acid” or “nucleic acid molecule” are often used interchangeably herein.

[0136] Nucleic acid molecules provided in the present invention also encompass numerous unique fragments, both longer and shorter than the nucleic acid molecule sequences set forth in the sequencing listing of the present application, more specifically of the B. burgdorferi s.s. coding regions, which can be generated by standard cloning methods. To be unique, a fragment must be of sufficient size to distinguish it from other known nucleic acid sequences, most readily determined by comparing any selected B. burgdorferi s.s. fragment to the nucleotide sequences in computer databases such as GenBank. It will be appreciated by the ones skilled in the art that what is said herein in any aspect in relation to B. burgdorferi s.l. applies equally to any of the other Borrelia species described herein, more preferably any pathogenic Borrelia species described herein.

[0137] Additionally, modifications can be made to the nucleic acid molecules and polypeptides that are encompassed by the present invention. For example, nucleotide substitutions can be made which do not affect the polypeptide encoded by the nucleic acid, and thus any nucleic acid molecule which encodes a hyperimmune serum reactive antigen or fragments thereof is encompassed by the present invention.

[0138] Furthermore, any of the nucleic acid molecules encoding hyperimmune serum reactive antigens or fragments thereof provided by the present invention can be functionally linked, using standard techniques such as standard cloning techniques, to any desired regulatory sequences, whether an B. burgdorferi s.l. regulatory sequence or a heterologous regulatory sequence, heterologous leader sequence, heterologous marker sequence or a heterologous coding sequence to create a fusion protein.

[0139] Nucleic acid molecules of the present invention may be in the form of RNA, such as mRNA or cRNA, or in the form of DNA, including, for instance, cDNA and genomic DNA obtained by cloning or produced by chemical synthetic techniques or by a combination thereof. The DNA may be triple-stranded, double-stranded or single-stranded. Single-stranded DNA may be the coding strand, also known as the sense strand, or it may be the non-coding strand, also referred to as the anti-sense strand.

[0140] The present invention further relates to variants of the nucleic acid molecules described herein which encode fragments, analogs and derivatives of the hyperimmune serum reactive antigens and fragments thereof having a deducted B. burgdorferi s.l. amino acid sequence set forth in the Sequence Listing. A variant of the nucleic acid molecule may be a naturally occurring variant such as a naturally occurring allelic variant, or it may be a variant that is not known to occur naturally. Such non-naturally occurring variants of the nucleic acid molecule may be made by mutagenesis techniques, including those applied to nucleic acid molecules, cells or organisms.

[0141] Among variants in this regard are variants that differ from the aforementioned nucleic acid molecules by nucleotide substitutions, deletions or additions. The substitutions, deletions or additions may involve one or more nucleotides. The variants may be altered in coding or non-coding regions or both. Alterations in the coding regions may produce conservative or non-conservative amino acid substitutions, deletions or additions. Preferred are nucleic acid molecules encoding a variant, analog, derivative or fragment, or a variant, analogue or derivative of a fragment, which have an B. burgdorferi s.l. sequence as set forth in the Sequence Listing, in which several, a few, 5 to 10, 1 to 5, 1 to 3, 2, 1 or no amino acid(s) is substituted, deleted or added, in any combination. Especially preferred among these are silent substitutions, additions and deletions, which do not alter the properties and activities of the B. burgdorferi s.l. polypeptides set forth in the Sequence Listing. Also especially preferred in this regard are conservative substitutions.

[0142] Variants of any of the antigens in their various embodiments disclosed herein and in particular the antigens and peptides specified herein by Seq ID Nos 135 to 268, 388 to 506 or 629 to 750, can typically also be characterized by means of bioinformatics. Respective tools such as the NCBI Basic Local Alignment Search Tool (BLAST) (Altschul, S. et al., 1990) are available from several sources, including the National Center for Biotechnology Information (NCBI, Bethesda, Md.) and on the Internet, for use in connection with the sequence analysis programs blastp, blastn, blastx, tblastn and tblastx. For comparisons of amino acid sequences of at least 35 amino acids, the Blast 2 sequences function of NCBI Blast 2.0 was employed using the default BLOSUM62 matrix set to default parameters (gapped blastp; gap existence cost of 11, and a per residue gap cost of 1). When aligning short peptides (fewer than around 35 amino acids), the alignment is performed using the Blast 2 sequences function, employing the PAM30 matrix set to default parameters (open gap 9, extension gap 1 penalties). Methods for determining sequence identity over such short windows such as 15 amino acids or less are described at the website that is maintained by the National Center for Biotechnology Information in Bethesda, Md. (http://www.ncbi.nlm.nih.gov/BLAST).

[0143] The functional active variant of an antigen which is also referred to herein either as the functional variant or the active variant which in turn are used herein in an interchangeable manner, is obtained by sequence alterations in the protein, hyperimmune serum reactive antigen or antigen which are collectively also referred to herein as the polypeptides according to the present invention, including each and any variant, fragment, analogue or derivative thereof, if not explicitly indicated to the contrary, wherein the polypeptide according to the present invention with the sequence alterations retains a function of the unaltered polypeptide according to the present invention, such as it specifically binds a polypeptide specific antibody that binds an unaltered form of the polypeptide according to the present invention. Such sequence alterations can include, but are not limited to, conservative substitutions, deletions, mutations and insertions. Preferably, the active variant exhibits reactivity with human sera of Lyme disease patients, more preferably mediates seroconversion and most preferably shows bactericidal activity. These characteristics of the active variant can be assessed e.g. as detailed in the Examples. In the context of the present invention a variant specifically binds a specific antibody (preferably being polyclonal antibodies raised against recombinant proteins in animals such as mouse, rabbit or monoclonal antibodies generated in mouse), exhibits reactivity with human sera of Lyme disease patients, mediates seroconversion or shows bactericidal activity, if the activity of the variant amounts to at least 10%, preferably at least 25%, more preferably at least 50%, even more preferably at least 70%, still more preferably at least 80%, especially at least 90%, particularly at least 95%, most preferably at least 99% of the activity of the antigen without sequence alterations.

[0144] The term “functional active variant” or “active variant” includes naturally-occurring allelic variants, as well as mutants or any other non-naturally occurring variants. As is known in the art, an allelic variant is an alternate form of a (poly)peptide that is characterized as having a substitution, deletion, or addition of one or more amino acids that does essentially not alter the biological function of the polypeptide. By “biological function” is preferably meant a function of the polypeptide in cells or organisms in which it naturally occurs, even if the function is not necessary for the growth or survival of the cells and organisms, respectively. For example, the biological function of a porin is to allow the entry into cell of compounds present in the extracellular medium. The biological function is distinct from the antigenic function. A polypeptide according to the present invention can have more than one biological function.

[0145] Within any species of the living world, allelic variation is the rule. For example, any bacterial species, e.g. Borrelia burgdorferi s.l., is usually represented by a variety of strains (characterized by clonal reproduction) that differ from each other by minor allelic variations. Indeed, a polypeptide that fulfils the same biological function in different strains can have an amino acid sequence that is not identical in each of the strains. Such an allelic variation is equally reflected at the polynucleotide level.

[0146] Allelic variation is very common within the Borrelia species as described for ospC (Livey, I. et al., 1995).

[0147] In a preferred embodiment, the active variant of or the active fragment derived from the polypeptide according to the present invention by amino acid exchanges, deletions or insertions may also conserve, or more preferably improve, the activity (reactivity, seroconversion and/or bactericidal activity as defined herein). Furthermore, these polypeptides may also cover epitopes, which trigger the same or preferably an improved T cell response. These epitopes are referred to as “heteroclitic” as further defined herein. They have a similar or preferably greater affinity to MHC/HLA molecules, and the ability to stimulate the T cell receptors (TCR) directed to the original epitope in a similar or preferably stronger manner. Heteroclitic epitopes can be obtained by rational design i.e. taking into account the contribution of individual residues to binding to MHC/HLA as for instance described by Rammensee et al. (Rammensee, H. et al., 1999, Immunogenetics. 50: 213-219), combined with a systematic exchange of residues potentially interacting with the TCR and testing the resulting sequences with T cells directed against the original epitope. Such a design is possible for a skilled man in the art without undue experimentation.

[0148] In a still more preferred embodiment of the invention the active variant of a polypeptide according to the present invention is any of any the polypeptides disclosed herein and more specifically any of the polypeptides defined by the Seq ID Nos 135 to 268, 388 to 506 or 629 to 750, having at least 50% sequence identity to the polypeptides of any of said Seq ID Nos, especially at least 60%, preferably at least 70%, more preferably at least 80%, still more preferably at least 90%, even more preferably at least 95%, most preferably 99% sequence identity to the polypeptides of any of said Seq ID Nos and/or is derived from said polypeptides of any of the sequences of Seq ID Nos by conservative substitutions. Conservative substitutions are those that take place within a family of amino acids that are related in their side chains and chemical properties. Examples of such families are amino acids with basic side chains, with acidic side chains, with non-polar aliphatic side chains, with non-polar aromatic side chains, with uncharged polar side chains, with small side chains, with large side chains etc. In one embodiment, one conservative substitution is included in the peptide. In another embodiment, two conservative substitutions or less are included in the peptide. In a further embodiment, three conservative substitutions or less are included in the peptide.

[0149] Examples of conservative amino acid substitutions include, but are not limited to, those listed below:

| Original Residue | Conservative Substitutions |
|---|---|
| Ala | Ser |
| Arg | Lys |
| Asn | Gln; His |
| Asp | Glu |
| Cys | Ser |
| Gln | Asn |
| Glu | Asp |
| His | Asn; Gln |
| Ile | Leu, Val |
| Leu | Ile; Val |
| Lys | Arg; Gln; Asn |
| Met | Leu; Ile |
| Phe | Met; Leu; Tyr |
| Ser | Thr |
| Thr | Ser |
| Trp | Tyr |
| Tyr | Trp; Phe |
| Val | Ile; Leu |

[0150] The polypeptides according to the present invention, and fragments and variants thereof, also include or consist of modified epitopes wherein preferably one or two of the amino acids of a given epitope are modified or replaced according to the rules disclosed in, e.g., Tourdot, S. et al., 2000, as well as the nucleic acid sequences encoding such modified epitopes. The epitopes as presented by the polypeptides according to the present invention are also referred to herein as the present epitopes.

[0151] It is clear that also epitopes derived from the present epitopes by amino acid exchanges improving, conserving or at least not significantly impeding the T cell activating capability of the epitopes are covered by the epitopes according to the present invention. Therefore the present epitopes also cover epitopes, which do not contain the original sequence as derived from B. burgdorferi s.l., but trigger the same or preferably an improved T cell response. These epitope are referred to as “heteroclitic”; they need to have a similar or preferably greater affinity to MHC/HLA molecules, and the need the ability to stimulate the T cell receptors (TCR) directed to the original epitope in a similar or preferably stronger manner.

[0152] Another possibility for identifying epitopes and more specifically heteroclitic epitopes includes the screening of peptide libraries with T cells directed against one or several of the present epitopes. A preferred way is the positional scanning of synthetic peptide libraries. Such approaches have been described in detail for instance by Hemmer, B. et al., 1999 and the references given therein.

[0153] As an alternative to epitopes represented by the present derived amino acid sequences or heteroclitic epitopes as disclosed herein, also substances or compounds mimicking these epitopes which are also referred to herein as “peptidemimetica” or “retro-inverse-peptides” can be applied and are thus within the present invention.

[0154] Another aspect of the design of improved epitopes is their formulation or modification with substances increasing their capacity to stimulate T cells. These include T helper cell epitopes, lipids or liposomes or preferred modifications as described in WO 01/78767.

[0155] Another way to increase the T cell stimulating capacity of epitopes is their formulation with immune stimulating substances for instance cytokines or chemokines like interleukin-2, -7, -12, -18, class I and II interferons (IFN), especially IFN-gamma, GM-CSF, TNF-alpha, flt3-ligand and others.

[0156] The nucleic acid molecules of the present invention may also be used as a hybridisation probe for, e.g., RNA, cDNA and genomic DNA to isolate full-length cDNAs and genomic clones encoding polypeptides of the present invention and to isolate cDNA and genomic clones of other genes that have a high sequence similarity to the nucleic acid molecules of the present invention. Such probes generally will comprise at least 15 bases. Preferably, such probes will have at least 20, at least 25 or at least 30 bases, and may have at least 50 bases. Particularly preferred probes will have at least 30 bases, and will have 50 bases or less, such as 30, 35, 40, 45, or 50 bases.

[0157] For example, the coding region of a nucleic acid molecule of the present invention may be isolated by screening a relevant library using the known DNA sequence to synthesize an oligonucleotide probe. A labelled oligonucleotide having a sequence complementary to that of a gene of the present invention is then used to screen a library of cDNA, genomic DNA or mRNA to determine to which members of the library the probe hybridizes.

[0158] The nucleic acid molecules and polypeptides of the present invention may be employed as reagents and materials for the development or manufacture of medicaments and/or diagnostics for diseases, particularly human disease, as further discussed herein.

[0159] The nucleic acid molecules of the present invention that are oligonucleotides can be used in the processes herein as described, but preferably for PCR, to determine whether or not the B. burgdorferi s.l. genes identified herein in whole or in part are present and/or transcribed in infected tissue such as skin, synovia or blood. It is recognized that such sequences will also have utility in diagnosis of the stage of infection and type of infection the pathogen has attained. For this and other purposes arrays which are known as such in the art, comprising at least one of the nucleic acids or polypeptides according to the present invention as described herein, may be used.

[0160] The nucleic acid molecules according to the present invention may be used for the detection of nucleic acid molecules and organisms or samples containing these nucleic acids. Preferably such detection is for diagnosis, more preferable for the diagnosis of a disease related or linked to the present or abundance of B. burgdorferi s.s. or any other pathogen species of Borrelia, preferably B. afzelii or B. garinii.

[0161] Eukaryotes (herein also “individual(s)”), particularly mammals, and especially humans, infected with B. burgdorferi s.s. or any other pathogen species of Borrelia, preferably B. afzelii or B. garinii can be identified by detecting any of the nucleic acid molecules according to the present invention detected at the DNA level by a variety of techniques. Preferred nucleic acid molecules candidates for distinguishing B. burgdorferi s.s. or said other pathogenic Borrelia. from other organisms can be obtained.

[0162] The invention provides a process for diagnosing disease, arising from infection with B. burgdorferi s.s. or any other pathogen species of Borrelia, preferably B. afzelii or B. garinii, comprising determining from a sample isolated or derived from an individual an increased level of expression of a nucleic acid molecule having the sequence of a nucleic acid molecule as disclosed herein and more preferably set forth in the Sequence Listing. Expression of nucleic acid molecules can be measured using any one of the methods well known in the art for the quantification of nucleic acid molecules, such as, for example, PCR, RT-PCR, RNase protection, Northern blotting, other hybridisation methods and the arrays described herein.

[0163] Isolated as used herein means separated “by the hand of man” from its natural state; i.e., that, if it occurs in nature, it has been changed or removed from its original environment, or both. For example, a naturally occurring nucleic acid molecule or a polypeptide naturally present in a living organism in its natural state is not “isolated”, but the same nucleic acid molecule or polypeptide separated from the coexisting materials of its natural state is “isolated”, as the term is employed herein. As part of or following isolation, such nucleic acid molecules can be joined to other nucleic acid molecules, such as DNAs, for mutagenesis, to form fusion proteins, and for propagation or expression in a host, for instance. The isolated nucleic acid molecules, alone or joined to other nucleic acid molecules such as vectors, can be introduced into host cells, in culture or in whole organisms. Introduced into host cells in culture or in whole organisms, such DNAs still would be isolated, as the term is used herein, because they would not be in their naturally occurring form or environment. Similarly, the nucleic acid molecules and polypeptides may occur in a composition, such as a media formulations, solutions for introduction of nucleic acid molecules or polypeptides, for example, into cells, compositions or solutions for chemical or enzymatic reactions, for instance, which are not naturally occurring compositions, and, therein remain isolated nucleic acid molecules or polypeptides within the meaning of that term as it is employed herein.

[0164] The nucleic acids according to the present invention may be chemically synthesized. Alternatively, the nucleic acids can be isolated from B. burgdorferi s.s. or any other pathogen species of Borrelia, preferably B. afzelii or B. garinii by methods known to the one skilled in the art. The same applies to the polypeptides according to the present invention.

[0165] According to another aspect of the present invention, a comprehensive set of novel polypeptides is provided. Such polypeptide, as mentioned previously herein, are proteins, hyperimmune serum reactive antigens and antigens as disclosed herein, and the fragments thereof, preferably the active fragments thereof, and the variants thereof, preferably the active variants thereof. Preferably, the polypeptides according to the present invention are hyperimmune serum reactive antigens and fragments thereof. In a preferred embodiment of the invention, a hyperimmune serum-reactive antigen comprising an amino acid sequence being preferably encoded by any one of the nucleic acids molecules and fragments thereof as described herein, are provided. In another preferred embodiment of the invention a novel set of proteins, hyperimmune serum reactive antigens and antigens, and active fragments as well as active variant thereof is provided which comprise amino acid sequences selected from the group comprising Seq ID Nos 135 to 268, 388 to 506 or 629 to 750.

[0166] Especially preferred polypeptides according to the present invention, or fragments thereof, are those which are listed in Tables 8 and 10.

[0167] The polypeptides according to the present invention, i.e. the proteins, hyperimmune serum reactive antigens and antigens, as provided by the present invention preferably include any polypeptide or molecule set forth in the Sequence Listing as well as polypeptides which have at least 70% identity to such polypeptide according to the present invention, preferably at least 80% or 85% identity to such polypeptide according to the present invention, and more preferably at least 90% similarity (more preferably at least 90% identity) to such polypeptide according to the present invention and more preferably as set forth in the Sequence Listing and still more preferably at least 95%, 96%, 97%, 98%, 99% or 99.5% similarity (still more preferably at least 95%, 96%, 97%, 98%, 99%, or 99.5% identity) to such polypeptide according to the present invention and also include portions of such polypeptides with such portion of the polypeptide generally containing at least 4 amino acids and more preferably at least 8, still more preferably at least 30, still more preferably at least 50 amino acids, such as 4, 8, 10, 20, 30, 35, 40, 45 or 50 amino acids. In a preferred embodiment such portions are active fragments of the polypeptides according to the present invention.

[0168] The invention also relates to fragments, analogs, and derivatives of the polypeptides according to the present invention, and fragments thereof and variant thereof. The terms “fragment”, “derivative” and “analog” when referring to such polypeptide according to the present invention whose amino acid sequence is preferably set forth in the Sequence Listing, preferably means a polypeptide which retains either individually or in any combination essentially the same or a similar biological function or activity, and/or the same or a similar structural attribute as such polypeptide. It will be acknowledged by the ones skilled in the art that the meaning of the term “similar biological function or activity” as used herein preferably depends on the polypeptide under consideration and more specifically its function. More preferably, a similar biological function or activity differs from the function of the non-fragment or the non-derivative in terms of one or several of the chemical, biological or other activity of such polypeptide according to the present invention. More preferably, the biological function or activity is defined by the extent of activity, affinity, antigenicity, preferably expressed as the antigenic index, immunogenicity, stability and/or specificity. In a preferred embodiment the difference is less than 50%, less than 75% or less than 90%. Particularly preferred fragments, analogs and derivatives are those comprising receptors or domains of enzymes that confer a function essential for viability of B. burgdorferi s.s. or any other pathogenic Borrelia species, or the ability to cause disease in humans. Further preferred fragments, analogs and derivatives of the polypeptides according to the present invention are those that comprise or contain antigenic or immunogenic determinants in an animal, especially in a human. Such fragments are also referred to as antigenic fragments, antigenic derivatives and antigenic analogs, respectively. It is also within an embodiment of the present invention that such similar biological function or activity is a decrease in undesirable activity. Preferably such decrease is at least 10%, preferably at least 20% and more preferably at least 50% of such activity exhibited by the polypeptide according to the present invention. In a particularly preferred embodiment such decreased undesirable activity is enzymatic and toxic function and/or generation of human cross-reactive antibodies. It will also be acknowledged by the ones skilled in the art that the meaning of the term “similar structural attribute” as used herein preferably depends on the polypeptide under consideration and more specifically its function and/or its structure. In a preferred embodiment such structural attributes are alpha-helix and alpha-helix forming regions, beta-sheet and beta-sheet forming regions, turn and turn-forming regions, coil and coil-forming regions, hydrophilic regions, hydrophobic regions, alpha-amphipathic regions, beta-amphipathic regions, flexible regions, surface-forming regions, substrate binding regions, and high antigenic index regions of the polypeptide according to the present invention, and combinations thereof.

[0169] In an embodiment the fragment, derivative, variant or analog of a polypeptide according to the present invention is 1) one in which one or more of the amino acid residues are substituted with a conserved or non-conserved amino acid residue (preferably a conserved amino acid residue) and such substituted amino acid residue may or may not be one encoded by the genetic code, or 2) one in which one or more of the amino acid residues includes a substituent group, or 3) one in the polypeptide according to the present invention or a fragment thereof is fused with another compound, such as a compound to increase the half-life of the polypeptide according to the present invention thereof such as, for example, polyethylene glycol, or 4) one in which the additional amino acids are fused to the polypeptide according to the present invention or a fragment thereof, such as a leader or secretory sequence or a sequence which is employed for purification of said polypeptide according to the present invention or fragment thereof or a proprotein sequence. Such fragments, derivatives, variant and analogs are deemed to be within the scope of those skilled in the art from the teachings herein.

[0170] The present invention also relates to proteins, hyperimmune serum reactive antigens and antigens of different B. burgdorferi s.s. isolates and isolates from other Borrelia species, preferably pathogenic Borrelia species including B. afzelii and B. garinii which are preferably homologues. Such homologues may easily be isolated based on the nucleic acid and amino acid sequences disclosed herein. There are multiple serotypes or clinical strains distinguished to date for each of the pathogens and the typing is based on serotype specific antisera or molecular approaches. The presence of any antigen can accordingly be determined for every serotype. In addition, it is possible to determine the variability of a particular antigen in the various Borrelia burgdorferi s.l. genospecies and strains as described for ospC (Livey, I. et al., 1995). The contribution of the various serotypes to the different Borrelia infections varies in different age groups and especially geographical regions. It is an important aspect that the most valuable protective antigens need to be conserved among various clinical strains.

[0171] Additionally, fusion polypeptides comprising such hyperimmune serum reactive antigens, variants, analogs, derivatives and fragments thereof, and variants, analogs and derivatives of the fragments are also encompassed by the present invention. Such fusion polypeptides and proteins, as well as nucleic acid molecules encoding them, can readily be made using standard techniques, including standard recombinant techniques for producing and expression of a recombinant polynucleic acid encoding a fusion protein.

[0172] Among preferred variants are those that vary from a reference by conservative amino acid substitutions. Such substitutions are those that substitute a given amino acid in a polypeptide according to the present invention by another amino acid of like characteristics. Typically seen as conservative substitutions are the replacements, one for another, among the aliphatic amino acids Ala, Val, Leu and Ile; interchange of the hydroxyl residues Ser and Thr, exchange of the acidic residues Asp and Glu, substitution between the amide residues Asn and Gln, exchange of the basic residues Lys and Arg and replacements among the aromatic residues Phe and Tyr.

[0173] Further particularly preferred in this regard are variants, analogs, derivatives and fragments, and variants, analogs and derivatives of the fragments, having the amino acid sequence of any polypeptide according to the present invention as disclosed herein and preferably set forth in the Sequence Listing, in which several, a few, 5 to 10, 1 to 5, 1 to 3, 2, 1 or no amino acid residues are substituted, deleted or added, in any combination. Especially preferred among these are silent substitutions, additions and deletions, which do not alter the properties and activities of the peptide of the present invention. Also especially preferred in this regard are conservative substitutions. Most highly preferred are peptides having an amino acid sequence set forth in the Sequence Listing without substitutions.

[0174] The polypeptides according to the present invention are preferably provided in an isolated form, and preferably are purified to homogeneity.

[0175] An antigenic fragment is preferably defined as a fragment, which is for itself antigenic or may be made antigenic when provided as a hapten. Therefore, also antigens or antigenic fragments showing one or, particularly for longer fragments, only a few amino acid exchanges are enabled by the present invention, provided that the antigenicity or antigenic capacities of such fragments with amino acid exchanges are not severely deteriorated on the exchange(s), i.e., suited for eliciting an appropriate immune response in an individual vaccinated with this antigen and identified by individual antibody preparations from individual sera.

[0176] Preferred examples of such fragments of the polypeptides according to the present invention are those which may also be taken from Tables 1, 5, 6, 8 and 10 and which are preferably those corresponding to the antigen in accordance with the eighth aspect of the present invention in its diverse embodiments, more preferably having or comprising the core amino acid sequence indicated in connection therewith.

[0177] All these fragments individually and each independently form a preferred selected aspect of the present invention.

[0178] It will be appreciated that the invention also relates to, among others, nucleic acid molecules encoding the aforementioned fragments, variants, active variants, and active fragments, nucleic acid molecules that hybridise to nucleic acid molecules encoding the fragments, variants, active variants, and active fragments, particularly those that hybridise under stringent conditions, and nucleic acid molecules, such as PCR primers, for amplifying nucleic acid molecules that encode the fragments. In these regards, preferred nucleic acid molecules are those that correspond to the preferred fragments, as discussed above.

[0179] The present invention also relates to vectors, which comprise a nucleic acid molecule or nucleic acid molecules of the present invention, host cells which are genetically engineered with vectors of the invention and the production of the polypeptides according to the present invention by recombinant techniques.

[0180] A great variety of expression vectors can be used to express the polypeptides according to the present invention. Generally, any vector suitable to maintain, propagate or express nucleic acids to express a polypeptide in a host may be used for expression in this regard. In accordance with this aspect of the invention the vector may be, for example, a plasmid vector, a single or double-stranded phage vector, a single or double-stranded RNA or DNA viral vector. Starting plasmids disclosed herein are either commercially available, publicly available, or can be constructed from available plasmids by routine application of well-known, published procedures. Preferred among vectors, in certain respects, are those for expression of nucleic acid molecules and the polypeptides according to the present invention. Nucleic acid constructs in host cells can be used in a conventional manner to produce the gene product encoded by the recombinant sequence. Alternatively, the polypeptides according to the preset invention can be synthetically produced by conventional peptide synthesizers. Mature proteins can be expressed in mammalian cells, yeast, bacteria, or other cells under the control of appropriate promoters. Cell-free translation systems can also be employed to produce such proteins using RNAs derived from the DNA construct of the present invention.

[0181] Host cells can be genetically engineered to incorporate nucleic acid molecules and express nucleic acid molecules of the present invention. Representative examples of appropriate hosts include bacterial cells, such as streptococci, staphylococci, E. coli, Streptomyces and Bacillus subtillis cells; fungal cells, such as yeast cells and Aspergillus cells; insect cells such as Drosophila S2 and Spodoptera Sf9 cells; animal cells such as CHO, COS, HeLa, C127, 3T3, BHK, 293 and Bowes melanoma cells; and plant cells.

[0182] The polypeptides according to the present invention may be expressed in a modified form, such as a fusion protein, and may include not only secretion signals but also additional heterologous functional regions. Thus, for instance, a region of additional amino acids, particularly charged amino acids, may be added to the N- or C-terminus of the polypeptide to improve stability and persistence in the host cell, during purification or during subsequent handling and storage. Also, regions may be added to the polypeptide to facilitate purification. Such regions may be removed prior to final preparation of the polypeptide. The addition of peptide moieties to polypeptides to engender secretion or excretion, to improve stability or to facilitate purification, among others, are familiar and routine techniques in the art. A preferred fusion protein comprises a heterologous region from immunoglobulin that is useful to solubilize or purify polypeptides. For example, EP 0 464 533 (Canadian counterpart 2045869) discloses fusion proteins comprising various portions of constant region of immunoglobin molecules together with another protein or part thereof. In drug discovery, for example, proteins have been fused with antibody Fc portions for the purpose of high-throughout screening assays to identify antagonists. See for example, (Bennett, D. et al., 1995) and (Johanson, K. et al., 1995). Fusions also may include the polypeptides according to the present invention fused or coupled to moieties other than amino acids, including lipids and carbohydrates. Further, antigens of this invention may be employed in combination with other vaccinal agents described by the prior art, as well as with other species of vaccinal agents derived from other microorganisms. Such proteins are useful in the prevention, treatment and diagnosis of diseases caused by a wide spectrum of Borrelia isolates. In a further embodiment the peptide of the invention is fused to an epitope tag which provides an epitope to which an anti-tag substance can selectively bind. The epitope tag is generally placed at the amino- or carboxyl-terminus of the peptide but may be incorporated as an internal insertion or substitution as the biological activity permits. The presence of such epitope-tagged forms of a peptide can be detected using a substance such as an antibody against the tagged peptide. Also, provision of the epitope tag enables the peptide to be readily purified by affinity purification using an anti-tag antibody or another type of affinity matrix that binds to the epitope tag. Various tag polypeptides and their respective antibodies are well known in the art. Examples include poly-histidine (poly-his), poly-histidine-glycine (poly-his-gly) tags, the HA tag polypeptide, the c-myc tag, the Strep tag and the FLAG tag.

[0183] The polypeptides according to the present invention can be recovered and purified from recombinant cell cultures by well-known methods including ammonium sulfate or ethanol precipitation, acid extraction, anion or cation exchange chromatography, phosphocellulose chromatography, hydrophobic interaction chromatography, hydroxylapatite chromatography and lectin chromatography.

[0184] The polypeptides according to the present invention can be produced by chemical synthesis as well as by biotechnological means. The latter comprise the transfection or transformation of a host cell with a vector containing a nucleic acid according to the present invention and the cultivation of the transfected or transformed host cell under conditions, which are known to the ones skilled in the art. The production method may also comprise a purification step in order to purify or isolate the polypeptide to be manufactured. In a preferred embodiment the vector is a vector according to the present invention.

[0185] The polypeptide according to the present invention may be used for the detection of the organism or organisms in a sample containing these organisms or proteins, hyperimmune serum reactive antigens or antigens, including fragments thereof. Preferably such detection is for diagnosis, more preferable for the diagnosis of a disease, most preferably for the diagnosis of a disease related or linked to the presence or abundance of Gram-negative bacteria, especially bacteria selected from the group comprising pathogenic Borrelia species including but not necessary limited to B. afzelii, B. burgdorferi s.s., B. garinii, B. lusitaniae and B. valaisiana, more preferably selected from the group comprising Borrelia burgdorferi s.s., Borrelia afzelii and Borrelia garinii.

[0186] The nucleic acids according to the present invention can also be used for the diagnosis or detection of organisms or organisms in a sample, whereby the organisms are preferably the same ones as disclosed in connection with the use of the polypeptides according to the present invention and the antibody according to the present invention, respectively. Basically, it is within the skills of the person of the art to design and practice such diagnosis and detection assays and methods, respectively, in the light of the present disclosure. More preferably such diagnosis or detection uses primers or probes to specifically interact with the nucleic acid molecules according to the present invention. The length and design of such primers and probes, respectively, varies depending on the particular method or diagnosis practiced. Using, in a preferred embodiment, a primer for, e.g., a PCR based detection or diagnosis system, i.e. method or assay, the length of the primer will range from about 10 nucleotides to about 30 nucleotides and more preferably from about 16 to 25 nucleotides. In case of a probe based detection or diagnosis system the length of the probe is preferably about the same as specified for the primer based system. Additionally, in case of a probe based system, the probe will comprise a moiety which allows its detection, either directly or indirectly. Such moiety for direct detection can be a radioactive label or a fluorescence label as known to the ones skilled in the art. Such moiety for indirect detection can be a biotin or any other moiety which mediates interaction with a further compound which in turn is labelled so as to allow its detection.

[0187] The present invention also relates to diagnostic assays such as quantitative and diagnostic assays for detecting levels of the polypeptides according to the present invention and more preferably hyperimmune serum reactive antigens and fragments thereof of the present invention in cells and tissues, including determination of normal and abnormal levels. Thus, for instance, a diagnostic assay in accordance with the invention for detecting over-expression of the polypeptides according to the present invention compared to normal control tissue samples may be used to detect the presence of an infection, for example, and to identify the infecting organism. Assay techniques that can be used to determine levels of such polypeptides in a sample derived from a host are well known to those of skill in the art. Such assay methods include radio immunoassays, competitive-binding assays, Western Blot analysis and ELISA assays. Among these, ELISA and Western Blot analysis frequently are preferred. An ELISA assay initially comprises preparing an antibody specific to one of the polypeptides according to the present invention, preferably a monoclonal antibody. In addition, a reporter antibody generally is prepared which binds to the monoclonal antibody. The reporter antibody is attached to a detectable reagent such as radioactive, fluorescent or enzymatic reagent, such as horseradish peroxidase enzyme. One or several of the polypeptides according to the present invention and more preferably a hyperimmune serum reactive antigen and fragment thereof according to the present invention may be immobilized on ELISA plates for detection of reactive antibodies in sera of patients or subjects to be tested.

[0188] A Western blot assay initially separates the polypeptides according to the present invention individually or in combination by SDS-polyacrylamide gelelectrophoresis and which subsequently are transferred and immobilized onto a solid support matrix, such as nitrocellulose, nylon or combinations thereof. Together with a reporter antibody reactive antibodies can be detected. The reporter antibody is attached to a detectable reagent such as radioactive, fluorescent or enzymatic reagent, such as horseradish peroxidase enzyme.

[0189] The polypeptides according to the present invention or the nucleic acid molecules according to the present invention or primers or probes directed thereto as described herein, may also be used for the purpose of or in connection with an array. In case of the nucleic acid molecule according to the present invention and the primers and probes directed thereagainst, the length of the probes and the primer, can also preferably be in the range from about 25 to about 75 nucleotides, more preferably from about 35 to about 50 nucleotides. More particularly, at least one of the polypeptides according to the present invention may be immobilized on a support. Said support typically comprises a variety of the polypeptides according to the present invention and/or hyperimmune serum reactive antigens and fragments thereof whereby the variety may be created by using one or several of the hyperimmune serum reactive antigens and fragments thereof according to the present invention and/or hyperimmune serum reactive antigens and fragments thereof being different. The characterizing feature of such array as well as of any array in general is the fact that at a distinct or predefined region or position on said support or a surface thereof, a distinct polypeptide is immobilized. Because of this any activity at a distinct position or region of an array can be correlated with a specific polypeptide. The number of different polypeptides and more preferably different hyperimmune serum reactive antigens and fragments thereof immobilized on a support may range from as little as 10 to several 1,000 different polypeptides and hyperimmune serum reactive antigens and fragments thereof, respectively. The density of said molecules per cm² is in a preferred embodiment as little as 10 per cm² to at least 400 different of such polypeptides per cm² and more particularly at least 1,000 different of such polypeptides and more preferably different hyperimmune serum reactive antigens and fragments thereof per cm². What is said herein about the immobilization of the polypeptides according to the present invention and their use, is also applicable to the nucleic acid molecules and the primers and probes, respectively, directed thereagainst, as will be acknowledged by the ones skilled in the art.

[0190] The manufacture of such arrays is known to the one skilled in the art and, for example, described in U.S. Pat. No. 5,744,309. The array preferably comprises a planar, porous or non-porous solid support having at least a first surface. The polypeptides according to the present invention are immobilized on said surface. Preferred support materials are, among others, glass or cellulose. It is also within the present invention that the array is used for any of the diagnostic applications described herein. Apart from the polypeptides according to the present invention also the nucleic acid molecules according to the present invention may be used for the generation of an array as described above which, in principle, can be used for any of the purposes disclosed for the array containing polypeptides. This applies as well to an array made of antibodies, preferably monoclonal antibodies as, among others, described herein.

[0191] In a further aspect the present invention relates to an antibody directed to any of polypeptides according to the present invention, derivatives, fragments, variants, active fragments and active variants thereof according to the present invention. The present invention includes, for example, monoclonal and polyclonal antibodies, chimeric, single chain, and humanized antibodies, as well as Fab fragments, or the product of a Fab expression library. It is within the present invention that the antibody may be chimeric, i.e. that different parts thereof stem from different species or at least the respective sequences are taken from different species.

[0192] Such antibodies in general and in particular directed against the hyperimmune serum reactive antigens and fragments thereof corresponding to a sequence of the present invention can be obtained by direct injection of a polypeptide according to the present invention into an animal or by administering said polypeptide to an animal, preferably a non-human. The antibody so obtained will then bind said polypeptide itself. In this manner, even a sequence encoding only a fragment said polypeptide can be used to generate antibodies binding the whole native polypeptides according to the present invention. Such antibodies can then be used to isolate the polypeptide according to the present invention from tissue expressing those hyperimmune serum reactive antigens and fragments thereof. It will be understood by the ones skilled in the art that this procedure is also applicable to the fragments, variants, active fragments and active variants thereof of said polypeptides.

[0193] For preparation of monoclonal antibodies, any technique known in the art, which provides antibodies produced by continuous cell line cultures can be used (as described originally in (Kohler, G. et al., 1975).

[0194] Techniques described for the production of single chain antibodies (U.S. Pat. No. 4,946,778) can be adapted to produce single chain antibodies to immunogenic hyperimmune serum reactive antigens and fragments thereof in their diverse embodiments according to this invention. Also, transgenic mice, or other organisms such as other mammals, may be used to express humanized antibodies to the polypeptides according to the present invention.

[0195] Alternatively, phage display technology or ribosomal display could be utilized to select antibody genes with binding activities towards the polypeptides according to the present invention either from repertoires of PCR amplified v-genes of lymphocytes from humans screened for possessing respective target antigens or from naïve libraries (McCafferty, J. et al., 1990; Marks, J. et al., 1992). The affinity of these antibodies can also be improved by chain shuffling (Clackson, T. et al., 1991).

[0196] If two antigen binding domains are present, each domain may be directed against a different epitope—termed ‘bispecific’ antibodies.

[0197] Preferably the antibody or derivative thereof is modified to make it less immunogenic in the individual. For example, if the individual is human the antibody may most preferably be “humanized”, wherein the complementarity determining region(s) of the hybridoma-derived antibody has been transplanted into a human monoclonal antibody, for example as described in (Jones, P. et al., 1986) or (Tempest, P. et al., 1991).

[0198] The above-described antibodies may be employed to isolate or to identify clones expressing the polypeptides according to the present invention by attachment of the antibody to a solid support for isolation and/or purification by affinity chromatography.

[0199] Thus, among others, antibodies against the polypeptides according to the present invention may be employed to inhibit and/or treat infections, particularly bacterial infections and especially infections arising from pathogenic Borrelia species, preferably B. burgdorferi s.s., B. afzelii and B. garinii.

[0200] The polypeptides according to the present invention and more specifically hyperimmune serum reactive antigens and fragments thereof in their diverse embodiments include antigenically, epitopically or immunologically equivalent derivatives, which form a particular aspect of this invention. The term “antigenically equivalent derivative” as used herein encompasses such polypeptide according to the present invention or its equivalent which will be specifically recognized by certain antibodies which, when raised to said polypeptide, interfere with the interaction between pathogen and mammalian host. The term “immunologically equivalent derivative” as used herein encompasses a peptide or its equivalent which when used in a suitable formulation to raise antibodies in a vertebrate, the antibodies act to interfere with the interaction between pathogen and mammalian host.

[0201] The polypeptides according to the present invention and more specifically the hyperimmune serum reactive antigens and fragments thereof in their diverse embodiments, such as an antigenically or immunologically equivalent derivative or a fusion protein thereof can be used as an antigen to immunize a mouse or other animal such as a rat or chicken. The fusion protein may provide stability to the polypeptide according to the present invention. Such polypeptide may be associated, for example by conjugation, with an immunogenic carrier protein, for example bovine serum albumin (BSA) or keyhole limpet haemocyanin (KLH). Alternatively, an antigenic peptide comprising multiple copies of the polypeptide according to the present invention and more preferably a hyperimmune serum reactive antigen and fragments thereof, or an antigenically or immunologically equivalent hyperimmune serum reactive antigen and fragments thereof, may be sufficiently antigenic to improve immunogenicity so as to obviate the use of a carrier.

[0202] The use of a nucleic acid molecule according to the present invention in genetic immunization will preferably employ a suitable delivery method such as direct injection of plasmid DNA into muscle, delivery of DNA complexed with specific protein carriers, coprecipitation of DNA with calcium phosphate, encapsulation of DNA in various forms of liposomes, particle bombardment (Tang, D. et al., 1992), (Eisenbraun, M. et al., 1993) and in vivo infection using cloned retroviral vectors (Seeger, C. et al., 1984).

[0203] In a further aspect the present invention relates to a peptide binding to any of the polypeptides according to the present invention, and a method for the manufacture of such peptides whereby the method is characterized by the use of said polypeptide and the basic steps are known to the one skilled in the art.

[0204] Such peptides may be generated by using methods according to the state of the art such as phage display or ribosome display. In case of phage display, basically a library of peptides is generated, in form of phages, and this kind of library is contacted with the target molecule, in the present case a polypeptide according to the present invention. Those peptides binding to the target molecule are subsequently removed, preferably as a complex with the target molecule, from the respective reaction. It is known to the one skilled in the art that the binding characteristics, at least to a certain extent, depend on the particularly realized experimental set-up such as the salt concentration and the like. After separating those peptides binding to the target molecule with a higher affinity or a bigger force, from the non-binding members of the library, and optionally also after removal of the target molecule from the complex of target molecule and peptide, the respective peptide(s) may subsequently be characterized. Prior to the characterisation optionally an amplification step is realized such as, e.g. by propagating the peptide encoding phages. The characterisation preferably comprises the sequencing of the target binding peptides. Basically, the peptides are not limited in their lengths, however preferably peptides having a length from about 8 to 20 amino acids are preferably obtained in the respective methods. The size of the libraries may be about 10² to 10¹⁸, preferably 10⁸ to 10¹⁵ different peptides, however, is not limited thereto. In a preferred embodiment such peptides are high-affinity binding peptides. In an even more preferred embodiment the peptides are peptide aptamers.

[0205] A particular form of target binding peptides as described above, are the so-called “anticalines” which are, among others, described in German patent application DE 197 42 706. In so far, the present invention is also related to peptides specifically binding to the polypeptides according to the present invention and the use thereof for any of the therapeutic and diagnostic applications described herein, preferably for antibodies.

[0206] In a further aspect the present invention relates to functional nucleic acids interacting with any of the polypeptides according to the present invention, and a method for the manufacture of such functional nucleic acids whereby the method is characterized by the use of the polypeptides according to the present invention and the basic steps are known to the one skilled in the art. The functional nucleic acids are preferably aptamers and spiegelmers. In so far, the present invention is also related to aptamers and spiegelmers specifically binding to the polypeptides according to the present invention and the use thereof for any of the therapeutic and diagnostic applications described herein, preferably for antibodies.

[0207] Aptamers are D-nucleic acids, which are either single stranded or double stranded and which specifically interact with a target molecule. The manufacture or selection of aptamers is, e.g. described in European patent EP 0 533 838. Basically the following steps are realized. First, a mixture of nucleic acids, i.e. potential aptamers, is provided whereby each nucleic acid typically comprises a segment of several, preferably at least eight subsequent randomized nucleotides. This mixture is subsequently contacted with the target molecule whereby the nucleic acid(s) bind to the target molecule, such as based on an increased affinity towards the target or with a bigger force thereto, compared to the candidate mixture. The binding nucleic acid(s) are/is subsequently separated from the remainder of the mixture. Optionally, the thus obtained nucleic acid(s) is amplified using, e.g. polymerase chain reaction. These steps may be repeated several times giving at the end a mixture having an increased ratio of nucleic acids specifically binding to the target from which the final binding nucleic acid is then optionally selected. These specifically binding nucleic acid(s) are referred to as aptamers. It is obvious that at any stage of the method for the generation or identification of the aptamers samples of the mixture of individual nucleic acids may be taken to determine the sequence thereof using standard techniques. It is within the present invention that the aptamers may be stabilized such as, e.g., by introducing defined chemical groups which are known to the one skilled in the art of generating aptamers. Such modification may for example reside in the introduction of an amino group at the 2′-position of the sugar moiety of the nucleotides. Aptamers are currently used as therapeutic agents. However, it is also within the present invention that the thus selected or generated aptamers may be used for target validation and/or as lead substance for the development of medicaments, preferably of medicaments based on small molecules. This is actually done by a competition assay whereby the specific interaction between the target molecule and the aptamer is inhibited by a candidate drug whereby upon replacement of the aptamer from the complex of target and aptamer it may be assumed that the respective drug candidate allows a specific inhibition of the interaction between target and aptamer, and if the interaction is specific, said candidate drug will, at least in principle, be suitable to block the target and thus decrease its biological availability or activity in a respective system comprising such target. The thus obtained small molecule may then be subject to further derivatisation and modification to optimise its physical, chemical, biological and/or medical characteristics such as toxicity, specificity, biodegradability and bioavailability.

[0208] Spiegelmers and their generation or manufacture is based on a similar principle. The manufacture of spiegelmers is described in international patent application WO 98/08856. Spiegelmers are L-nucleic acids, which means that they are composed of L-nucleotides rather than D-nucleotides as aptamers are. Spiegelmers are characterized by the fact that they have a very high stability in biological systems and, comparable to aptamers, specifically interact with the target molecule against which they are directed. In the process of generating spiegelmers, a heterogeneous population of D-nucleic acids is created and this population is contacted with the optical antipode of the target molecule, in the present case for example with the D-enantiomer of the naturally occurring L-enantiomer of the hyperimmune serum reactive antigens and fragments thereof according to the present invention. Subsequently, those D-nucleic acids are separated which do not interact with the optical antipode of the target molecule. But those D-nucleic acids interacting with the optical antipode of the target molecule are separated, optionally identified and/or sequenced and subsequently the corresponding L-nucleic acids are synthesized based on the nucleic acid sequence information obtained from the D-nucleic acids. These L-nucleic acids, which are identical in terms of sequence with the aforementioned D-nucleic acids interacting with the optical antipode of the target molecule, will specifically interact with the naturally occurring target molecule rather than with the optical antipode thereof. Similar to the method for the generation of aptamers it is also possible to repeat the various steps several times and thus to enrich those nucleic acids specifically interacting with the optical antipode of the target molecule.

[0209] In a further aspect the present invention relates to functional nucleic acids interacting with any of the nucleic acid molecules according to the present invention, and a method for the manufacture of such functional nucleic acids whereby the method is characterized by the use of the nucleic acid molecules and their respective sequences according to the present invention and the basic steps are known to the one skilled in the art. The functional nucleic acids are preferably ribozymes, antisense oligonucleotides and siRNA. In so far, the present invention is also related to this kind of functional nucleic acid specifically binding to the polypeptides according to the present invention and the use thereof for any of the therapeutic and diagnostic applications described herein, preferably for antibodies.

[0210] Ribozymes are catalytically active nucleic acids, which preferably consist of RNA, which basically comprises two moieties. The first moiety shows a catalytic activity whereas the second moiety is responsible for the specific interaction with the target nucleic acid, in the present case the nucleic acid coding for the polypeptides according to the present invention. Upon interaction between the target nucleic acid and the second moiety of the ribozyme, typically by hybridisation and Watson-Crick base pairing of essentially complementary stretches of bases on the two hybridising strands, the catalytically active moiety may become active which means that it catalyses, either intramolecularly or intermolecularly, the target nucleic acid in case the catalytic activity of the ribozyme is a phosphodiesterase activity. Subsequently, there may be a further degradation of the target nucleic acid, which in the end results in the degradation of the target nucleic acid as well as the protein derived from the said target nucleic acid. Ribozymes, their use and design principles are known to the one skilled in the art, and, for example described in (Doherty, E. et al., 2001) and (Lewin, A. et al., 2001).

[0211] The activity and design of antisense oligonucleotides for the manufacture of a medicament and as a diagnostic agent, respectively, is based on a similar mode of action. Basically, antisense oligonucleotides hybridise based on base complementarity, with a target RNA, preferably with a mRNA, thereby activating RNase H. RNase H is activated by both phosphodiester and phosphorothioate-coupled DNA. Phosphodiester-coupled DNA, however, is rapidly degraded by cellular nucleases with the exception of phosphorothioate-coupled DNA. These resistant, non-naturally occurring DNA derivatives do not inhibit RNase H upon hybridisation with RNA. In other words, antisense polynucleotides are only effective as DNA RNA hybrid complexes. Examples for this kind of antisense oligonucleotides are described, among others, in U.S. Pat. No. 5,849,902 and U.S. Pat. No. 5,989,912. In other words, based on the nucleic acid sequence of the target molecule which in the present case are the nucleic acid molecules for the hyperimmune serum reactive antigens and fragments thereof according to the present invention, either from the target protein from which a respective nucleic acid sequence may in principle be deduced, or by knowing the nucleic acid sequence as such, particularly the mRNA, suitable antisense oligonucleotides may be designed base on the principle of base complementarity.

[0212] Particularly preferred are antisense-oligonucleotides, which have a short stretch of phosphorothioate DNA (3 to 9 bases). A minimum of 3 DNA bases is required for activation of bacterial RNase H and a minimum of 5 bases is required for mammalian RNase H activation. In these chimeric oligonucleotides there is a central region that forms a substrate for RNase H that is flanked by hybridising “arms” comprised of modified nucleotides that do not form substrates for RNase H. The hybridising arms of the chimeric oligonucleotides may be modified such as by 2′-O-methyl or 2′-fluoro. Alternative approaches used methylphosphonate or phosphoramidate linkages in said arms. Further embodiments of the antisense oligonucleotide useful in the practice of the present invention are P-methoxyoligonucleotides, partial P-methoxyoligodeoxyribonucleotides or P-methoxyoligonucleotides.

[0213] Of particular relevance and usefulness for the present invention are those antisense oligonucleotides as more particularly described in the above two mentioned US patents. These oligonucleotides contain no naturally occurring 5′=>3′-linked nucleotides. Rather the oligonucleotides have two types of nucleotides: 2′-deoxyphosphorothioate, which activate RNase H, and 2′-modified nucleotides, which do not. The linkages between the 2′-modified nucleotides can be phosphodiesters, phosphorothioate or P-ethoxyphosphodiester. Activation of RNase H is accomplished by a contiguous RNase H-activating region, which contains between 3 and 5 2′-deoxyphosphorothioate nucleotides to activate bacterial RNase H and between 5 and 10 2′-deoxyphosphorothioate nucleotides to activate eukaryotic and, particularly, mammalian RNase H. Protection from degradation is accomplished by making the 5′ and 3′ terminal bases highly nuclease resistant and, optionally, by placing a 3′ terminal blocking group.

[0214] More particularly, the antisense oligonucleotide comprises a 5′ terminus and a 3′ terminus; and from position 11 to 59 5′=>3′-linked nucleotides independently selected from the group consisting of 2′-modified phosphodiester nucleotides and 2′-modified P-alkyloxyphosphotriester nucleotides; and wherein the 5′-terminal nucleoside is attached to an RNase H-activating region of between three and ten contiguous phosphorothioate-linked deoxyribonucleotides, and wherein the 3′-terminus of said oligonucleotide is selected from the group consisting of an inverted deoxyribonucleotide, a contiguous stretch of one to three phosphorothioate 2′-modified ribonucleotides, a biotin group and a P-alkyloxyphosphotriester nucleotide.

[0215] Also an antisense oligonucleotide may be used wherein not the 5′ terminal nucleoside is attached to an RNase H-activating region but the 3′ terminal nucleoside as specified above. Also, the 5′ terminus is selected from the particular group rather than the 3′ terminus of said oligonucleotide.

[0216] The nucleic acids as well as the polypeptides according to the present invention in their diverse embodiments may be used as or for the manufacture of pharmaceutical compositions, especially vaccines. Preferably such pharmaceutical composition, preferably vaccine is, for the prevention or treatment of diseases caused by, related to or associated with Borrelia species, preferably pathogenic Borrelia genospecies and more preferably B. burgdorferi s.s., B. afzelii and B. garinii. In so far another aspect of the invention relates to a method for inducing an immunological response in an individual, particularly a mammal, which comprises inoculating the individual with the polypeptides according to the present invention in their diverse embodiments, or a fragment or variant thereof, adequate to produce antibodies to protect said individual from infection by the above microorganisms.

[0217] Yet another aspect of the invention relates to a method of inducing an immunological response in an individual which comprises, through gene therapy or otherwise, delivering a nucleic acid molecule according to the present invention, preferably functionally encoding hyperimmune serum reactive antigens and fragments thereof in their diverse embodiments, for expressing the polypeptide according to the present invention in vivo in order to induce an immunological response to produce antibodies or a cell mediated T cell response, either cytokine-producing T cells or cytotoxic T cells, to protect said individual from disease, whether that disease is already established within the individual or not. One-way of administering the gene is by accelerating it into the desired cells as a coating on particles or otherwise.

[0218] A further aspect of the invention relates to an immunological composition which, when introduced into a host capable of having induced within it an immunological response, induces an immunological response in such host, wherein the composition comprises recombinant DNA which codes for and expresses at least one of the polypeptides according to the present invention in their diverse embodiments. The immunological response may be used therapeutically or prophylactically and may take the form of antibody immunity or cellular immunity such as that arising from CTL or CD4+ T cells.

[0219] The polypeptides according to the present invention in their diverse embodiments may be fused with a co-protein which may not by itself produce antibodies, but is capable of stabilizing the first protein and producing a fused protein which will have immunogenic and protective properties. This fused recombinant protein preferably further comprises an antigenic co-protein, such as Glutathione-S-transferase (GST) or beta-galactosidase, relatively large co-proteins which solubilise the protein and facilitate production and purification thereof. Moreover, the co-protein may act as an adjuvant in the sense of providing a generalized stimulation of the immune system. The co-protein may be attached to either the amino or carboxy terminus of the first protein.

[0220] Also provided by this invention are methods using the nucleic acid molecule according to the present invention in their diverse embodiments in such genetic immunization experiments in animal models of infection with any of the Borrelia species described herein, most preferably B. burgdorferi s.s., B. afzelii and B. garinii. Such molecules will be particularly useful for identifying protein epitopes able to provoke a prophylactic or therapeutic immune response. This approach can allow for the subsequent preparation of monoclonal antibodies of particular value from the requisite organ of the animal successfully resisting or clearing infection for the development of prophylactic agents or therapeutic treatments of the Borrelia species described herein and most preferably B. burgdorferi s.s., B. afzelii and B. garinii, infection in mammals, particularly humans.

[0221] The polypeptides according to the present invention in their diverse embodiments may be used as an antigen for vaccination of a host to produce specific antibodies which protect against invasion of bacteria, for example by blocking adherence of bacteria to damaged tissue. Examples of tissue damage and thus damaged tissue include wounds in skin or connective tissue and mucosal tissues caused e.g. by viral infection (esp. respiratory, such as the flu) mechanical, chemical or thermal damage or by implantation of indwelling devices, or wounds in the mucous membranes, such as the mouth, mammary glands, urethra or vagina.

[0222] The present invention also includes a vaccine formulation, which comprises one or several of polypeptides according to the present invention in their diverse embodiments together with a suitable carrier. Since said polypeptides according to the present invention may be broken down in the stomach, they are preferably administered parenterally, including, for example, administration that is subcutaneous, intramuscular, intravenous, intradermal intranasal or transdermal. Formulations suitable for parenteral administration include aqueous and non-aqueous sterile injection solutions which may contain anti-oxidants, buffers, bacteriostats and solutes which render the formulation isotonic with the bodily fluid, preferably the blood, of the individual; and aqueous and non-aqueous sterile suspensions which may include suspending agents or thickening agents. The formulations may be presented in unit-dose or multi-dose containers, for example, sealed ampoules and vials, and may be stored in a freeze-dried condition requiring only the addition of the sterile liquid carrier immediately prior to use. The vaccine formulation may also include adjuvant systems for enhancing the immunogenicity of the formulation, such as oil-in-water systems and other systems known in the art. The dosage will depend on the specific activity of the vaccine and can be readily determined by routine experimentation.

[0223] According to another aspect, the present invention relates to a pharmaceutical composition comprising one or several of the polypeptides according to the present invention in their diverse embodiments for the various Borrelia species described herein and most preferably B. burgdorferi s.l., B. afzelii or B. garinii. Such a pharmaceutical composition may comprise one, preferably at least two or more of said polypeptides against said Borrelia species. Optionally, such polypeptides may also be combined with antigens against even further pathogens in a combination pharmaceutical composition. Preferably, said pharmaceutical composition is a vaccine for preventing or treating an infection caused by a Borrelia species, more preferably a pathogenic Borrelia species such as B. burgdorferi s.s., B. afzelii or B. garinii and/or other pathogens against which the antigens have been included in the vaccine.

[0224] According to a further aspect, the present invention relates to a pharmaceutical composition comprising a nucleic acid molecule according to the present invention. Such a pharmaceutical composition may comprise one or more nucleic acid molecules according to the present invention encoding a polypeptide according to the present invention. Optionally, such nucleic acid molecules encoding the polypeptides according to the present invention are combined with nucleic acid molecules encoding antigens against other pathogens in a combination pharmaceutical composition. Preferably, said pharmaceutical composition is a vaccine for preventing or treating an infection caused by Borrelia species, more preferably pathogenic Borrelia species as disclosed herein more preferably comprising B. burgdorferi s.s., B. afzelii and B. garinii, and/or other pathogens against which the antigens have been included in the vaccine.

[0225] The pharmaceutical composition may contain any suitable auxiliary substances, such as buffer substances, stabilisers or further active ingredients, especially ingredients known in connection of pharmaceutical composition and/or vaccine production.

[0226] A preferable carrier/or excipient for the polypeptides according to the present invention in their diverse embodiments, or a nucleic acid molecule according to the present invention is an immunostimulatory compound for further stimulating the immune response to the polypeptide according to the present invention or a coding nucleic acid molecule thereof. Preferably the immunostimulatory compound in the pharmaceutical preparation according to the present invention is selected from the group of polycationic substances, especially polycationic peptides, immunostimulatory nucleic acids molecules, preferably immunostimulatory deoxynucleotides, alum, Freund's complete adjuvants, Freund's incomplete adjuvants, neuroactive compounds, especially human growth hormone, or combinations thereof.

[0227] It is also within the scope of the present invention that the pharmaceutical composition, especially vaccine, comprises apart from one or several of the polypeptides according to the present invention in their diverse embodiments and/or nucleic acid molecules coding thereof which are also in accordance with the present invention, other compounds which are biologically or pharmaceutically active. Preferably, the vaccine composition comprises at least one polycationic peptide. The polycationic compound(s) to be used according to the present invention may be any polycationic compound, which shows the characteristic effects according to the WO 97/30721. Preferred polycationic compounds are selected from basic polypeptides, organic polycations, basic polyamino acids or mixtures thereof. These polyamino acids should have a chain length of at least 4 amino acid residues (WO 97/30721). Especially preferred are substances like polylysine, polyarginine and polypeptides containing more than 20%, especially more than 50% of basic amino acids in a range of more than 8, especially more than 20, amino acid residues or mixtures thereof. Other preferred polycations and their pharmaceutical compositions are described in WO 97/30721 (e.g. polyethyleneimine) and WO 99/38528. Preferably these polypeptides contain between 20 and 500 amino acid residues, especially between 30 and 200 residues.

[0228] These polycationic compounds may be produced chemically or recombinantly or may be derived from natural sources.

[0229] Cationic (poly)peptides may also be anti-microbial with properties as reviewed in (Ganz, T., 1999). These (poly)peptides may be of prokaryotic or animal or plant origin or may be produced chemically or recombinantly (WO 02/13857). Peptides may also belong to the class of defensins (WO 02/13857). Sequences of such peptides can be, for example, found in the Antimicrobial Sequences Database under the following internet address: http://www.bbcm.univ.trieste.it/˜tossi/pag2.html

[0230] Such host defence peptides or defensives are also a preferred form of the polycationic polymer according to the present invention. Generally, a compound allowing as an end product activation (or down-regulation) of the adaptive immune system, preferably mediated by APCs (including dendritic cells) is used as polycationic polymer.

[0231] Especially preferred for use as polycationic substances in the present invention are cathelicidin derived antimicrobial peptides or derivatives thereof (International patent application WO 02/13857, incorporated herein by reference), especially antimicrobial peptides derived from mammalian cathelicidin, preferably from human, bovine or mouse.

[0232] Polycationic compounds derived from natural sources include HIV-REV or HIV-TAT (derived cationic peptides, antennapedia peptides, chitosan or other derivatives of chitin) or other peptides derived from these peptides or proteins by biochemical or recombinant production. Other preferred polycationic compounds are cathelin or related or derived substances from cathelin. For example, mouse cathelin is a peptide, which has the amino acid sequence NH₂-RLAGLLRKGGEKIGEKLKKIGOKIKNFFQKLVPQPE-COOH. Related or derived cathelin substances contain the whole or parts of the cathelin sequence with at least 15-20 amino acid residues. Derivations may include the substitution or modification of the natural amino acids by amino acids, which are not among the 20 standard amino acids. Moreover, further cationic residues may be introduced into such cathelin molecules. These cathelin molecules are preferred to be combined with the antigen. These cathelin molecules surprisingly have turned out to be also effective as an adjuvant for an antigen without the addition of further adjuvants. It is therefore possible to use such cathelin molecules as efficient adjuvants in vaccine formulations with or without further immunactivating substances.

[0233] Another preferred polycationic substance to be used in accordance with the present invention is a synthetic peptide containing at least 2 KLK-motifs separated by a linker of 3 to 7 hydrophobic amino acids (International patent application WO 02/32451, incorporated herein by reference).

[0234] The pharmaceutical composition of the present invention may further comprise immunostimulatory nucleic acid(s). Immunostimulatory nucleic acids are e.g. neutral or artificial CpG containing nucleic acids, short stretches of nucleic acids derived from non-vertebrates or in form of short oligonucleotides (ODNs) containing non-methylated cytosine-guanine di-nucleotides (CpG) in a certain base context (e.g. described in WO 96/02555). Alternatively, also nucleic acids based on inosine and cytidine as e.g. described in the WO 01/93903, or deoxynucleic acids containing deoxy-inosine and/or deoxyuridine residues (described in WO 01/93905 and WO 02/095027, incorporated herein by reference) may preferably be used as immunostimulatory nucleic acids in connection with the present invention. Preferably, the mixtures of different immunostimulatory nucleic acids may be used according to the present invention.

[0235] It is also within the present invention that any of the aforementioned polycationic compounds is combined with any of the immunostimulatory nucleic acids as aforementioned. Preferably, such combinations are according to the ones as described in WO 01/93905, WO 02/32451, WO 01/54720, WO 01/93903, WO 02/13857 and WO 02/095027 and WO 03/047602, incorporated herein by reference.

[0236] In addition or alternatively such vaccine composition may comprise apart from the polypeptides according to the present invention, and the nucleic acid molecules according to the present invention, preferably the coding nucleic acid molecules according to the present invention, a neuroactive compound. Preferably, the neuroactive compound is human growth factor as, e.g. described in WO 01/24822. Also preferably, the neuroactive compound is combined with any of the polycationic compounds and/or immunostimulatory nucleic acids as afore-mentioned.

[0237] Also, the pharmaceutical composition in accordance with the present invention is a pharmaceutical composition which comprises at least any of the following compounds or combinations thereof: the nucleic acid molecules according to the present invention, the polypeptides according to the present invention in their diverse embodiments, the vector according to the present invention, the cells according to the present invention, the antibody according to the present invention, the functional nucleic acids according to the present invention and the binding peptides such as the anticalines and high-affinity binding peptides and peptide aptamers, respectively, according to the present invention, any agonists and antagonists according to the present invention, preferably screened as described herein. In connection therewith any of these compounds may be employed in combination with a non-sterile or sterile carrier or carriers for use with cells, tissues or organisms, such as a pharmaceutical carrier suitable for administration to a subject. Such compositions comprise, for instance, a media additive or a therapeutically effective amount of a hyperimmune serum reactive antigen and fragments thereof of the invention and a pharmaceutically acceptable carrier or excipient. Such carriers may include, but are not limited to, saline, buffered saline, dextrose, water, glycerol, ethanol and combinations thereof. The formulation should suit the mode of administration.

[0238] The pharmaceutical compositions of the present invention may be administered in any effective, convenient manner including, for instance, administration by topical, oral, anal, vaginal, intravenous, intraperitoneal, intramuscular, subcutaneous, intranasal, intratracheal or intradermal routes among others.

[0239] In therapy or as a prophylactic, the active agent of the pharmaceutical composition of the present invention may be administered to an individual as an injectable composition, for example as a sterile aqueous dispersion, preferably isotonic.

[0240] Alternatively the composition, preferably the pharmaceutical composition may be formulated for topical application, for example in the form of ointments, creams, lotions, eye ointments, eye drops, ear drops, mouthwash, impregnated dressings and sutures and aerosols, and may contain appropriate conventional additives, including, for example, preservatives, solvents to assist drug penetration, and emollients in ointments and creams. Such topical formulations may also contain compatible conventional carriers, for example cream or ointment bases, and ethanol or oleyl alcohol for lotions. Such carriers may constitute from about 1% to about 98% by weight of the formulation; more usually they will constitute up to about 80% by weight of the formulation.

[0241] In addition to the therapy described above, the compositions of this invention may be used generally as a wound treatment agent to prevent adhesion of bacteria to matrix proteins exposed in wound tissue and for prophylactic use in dental treatment as an alternative to, or in conjunction with, antibiotic prophylaxis.

[0242] In a preferred embodiment the pharmaceutical composition is a vaccine composition. Preferably, such vaccine composition is conveniently in injectable form. Conventional adjuvants may be employed to enhance the immune response. A suitable unit dose for vaccination with a protein antigen is for adults between 0.02 to 3 μg antigen/per kg of body weight and for children between 0.2 to 10 μg antigen/per kg body weight, and such dose is preferably administered 1-3 times and with an interval of 2 to 24 weeks.

[0243] With the indicated dose range, no adverse toxicological effects are expected with the compounds of the invention, which would preclude their administration to suitable individuals.

[0244] In a further embodiment the present invention relates to diagnostic and pharmaceutical packs and kits comprising one or more containers filled with one or more of the ingredients of the aforementioned compositions of the invention. The ingredient(s) can be present in a useful amount, dosage, formulation or combination. Associated with such container(s) can be a notice in the form prescribed by a governmental agency regulating the manufacture, use or sale of pharmaceuticals or biological products, reflecting approval by the agency of the manufacture, use or sale of the product for human administration.

[0245] In connection with the present invention any disease related use as disclosed herein such as, e.g., use of the pharmaceutical composition or vaccine, is particularly a disease or diseased condition which is caused by, linked or associated with Borrelia, more preferably any pathogenic Borrelia species and more preferably any Borrelia species selected from B. burgdorferi s.s., B. afzelii or B. garinii. In connection therewith it is to be noted that the various Borrelia species including B. burgdorferi s.l. comprise several genospecies and strains including those disclosed herein. A disease related, caused or associated with the bacterial infection to be prevented and/or treated according to the present invention includes Lyme borreliosis (Lyme disease). Further aspects, symptoms, stages and subgroups of Lyme borreliosis as well as specific groups of patients suffering from such disease as also disclosed herein, including in the introductory part, are incorporated herein by reference. More specifically, Lyme borreliosis generally occurs in stages, with remission and exacerbations with different clinical manifestation at each stage (Steere, 1989). Early infection stage 1 consists of localized infection of the skin, followed within days or weeks by stage 2, disseminated infection, and months to years later by stage 3, persistent infection. However, the infection is variable; some patients have only localized infections of the skin, while others display only later manifestations of the illness, such as arthritis. Different clinical syndromes of Lyme borreliosis are also caused by infection with diverse B. burgdorferi s.l. species. B. burgdorferi s.s. more often causes joint manifestations (arthritis) and heart problems, B. afzelii causes mainly dermal symptoms (EM and ACA), and B. garinii is mostly responsible for neuroborreliosis.

[0246] Localized infection—The most common symptom of stage 1 of an infection is erythema migrans, which occurs in 70-80% of infected people. This skin lesion is often followed by flu-like symptoms, such as myalgia, arthralgia, headache and fever. These non-specific symptoms occur in 50% of patients with erythema migrans.

[0247] Disseminated infection —During stage 2 the bacteria move into the blood stream from the site of infection and to more distant tissues and organs. Neurological, cardiovascular and arthritic symptoms that occur in this stage include meningitis, cranial neuropathy and intermittent inflammatory arthritis.

[0248] Persistent infection—Stage 3 of the infection is chronic and occurs from months to years after the tick bite. The most common symptom in North America is rheumatoid arthritis, caused by an infection with B. burgdorferi s.s. Persistent infection of the central nervous system with B. garinii causes more severe neurological symptoms during stage 3, and a persistent infection of the skin with B. afzelii results in acrodermatitis chronica atrophicans.

[0249] It is within the present invention that each and any of the symptoms, diseases, disorders or syndromes described herein which are either directly or indirectly linked to or arise from a contact of an organism such as any animal or man with a Borrelia species, more preferably a pathogenic Borrelia species, and most preferably Borrelia burgdorferi s.s., Borrelia garinii, Borrelia afzelii, Borrelia andersonii, Borrelia bissettii, Borrelia valaisiana, Borrelia lusitaniae, Borrelia spielmani, Borrelia japonica, Borrelia tanukii, Borrelia turdae and Borrelia sinica are separately and independently indications, diseases or disorders in the meaning of the present invention. Accordingly and just by means of illustration, a disease in the sense of the present application is Lyme borreliosis as well as erythema migrans, neuroborreliosis and Lyme arthritis.

[0250] It is within the present invention that the disease for which the various compounds described herein can be used are also those diseases where the polypeptide according to the present invention is expressed or any disease where the compounds described herein such as the polypeptides according to the present invention, the vaccine, the antibody, and any aptamer and spiegelmer, respectively, are suitable for the treatment and/or diagnosis thereof. Such potential use can arise from cross-reactivity and homology, respectively. It understood by the ones skilled in the art that any disease described in connection with the pharmaceutical composition according to the present invention can be subject to the use of the medicament described herein, and vice versa.

[0251] In a still further embodiment the present invention is related to a screening method using any of the polypeptides according to the present invention or any of the nucleic acids according to the present invention. Screening methods as such are known to the one skilled in the art and can be designed such that an agonist or an antagonist is screened. In connection with such screening method preferably an antagonist is screened which in the present case inhibits or prevents the binding of any hyperimmune serum reactive antigen and fragment thereof according to the present invention to an interaction partner. Such interaction partner can be a naturally occurring interaction partner or a non-naturally occurring interaction partner.

[0252] The invention also provides a method for screening compounds to identify those, which enhance (agonist) or block (antagonist) the function of the polypeptides according to the present invention or of the nucleic acid molecules of the present invention, such as its interaction with a binding molecule. The method of screening may involve high-throughput.

[0253] For example, to screen for agonists or antagonists, the interaction partner of the nucleic acid molecule and nucleic acid, respectively, according to the present invention, maybe a synthetic reaction mix, a cellular compartment, such as a membrane, cell envelope or cell wall, or a preparation of any thereof, may be prepared from a cell that expresses a molecule that binds to the polypeptides according to the present invention. The preparation is incubated with labelled forms of such polypeptides in the absence or the presence of a candidate molecule, which may be an agonist or antagonist. The ability of the candidate molecule to bind the binding molecule is reflected in decreased binding of the labelled ligand. Molecules which bind gratuitously, i.e., without inducing the functional effects of said polypeptides, are most likely to be good antagonists. Molecules that bind well and elicit functional effects that are the same as or closely related to the polypeptides according to the present invention are good agonists.

[0254] The functional effects of potential agonists and antagonists may be measured, for instance, by determining the activity of a reporter system following interaction of the candidate molecule with a cell or appropriate cell preparation, and comparing the effect with that of polypeptides according to the present invention or molecules that elicit the same effects as said polypeptides. Reporter systems that may be useful in this regard include but are not limited to colorimetric labelled substrate converted into product, a reporter gene that is responsive to changes in the functional activity of the polypeptides according to the present invention, and binding assays known in the art.

[0255] Another example of an assay for antagonists is a competitive assay that combines the polypeptides according to the present invention and a potential antagonist with membrane-bound binding molecules, recombinant binding molecules, natural substrates or ligands, or substrate or ligand mimetics, under appropriate conditions for a competitive inhibition assay. The polypeptides according to the present invention can be labelled such as by radioactivity or a colorimetric compound, such that the molecule number of polypeptides according to the present invention bound to a binding molecule or converted to product can be determined accurately to assess the effectiveness of the potential antagonist.

[0256] Potential antagonists include small organic molecules, peptides, polypeptides and antibodies that bind to polypeptides according to the present invention and thereby inhibit or extinguish its activity. Potential antagonists may also be small organic molecules, a peptide, a polypeptide such as a closely related protein or antibody that binds to the same sites on a binding molecule without inducing functional activity of the polypeptides according to the present invention.

[0257] Potential antagonists include a small molecule, which binds to and occupies the binding site of the polypeptides according to the present invention thereby preventing binding to cellular binding molecules, such that normal biological activity is prevented. Examples of small molecules include but are not limited to small organic molecules, peptides or peptide-like molecules.

[0258] Other potential antagonists include antisense molecules (see Okano, H. et al., 1991; or OLIGODEOXYNUCLEOTIDES AS ANTISENSE INHIBITORS OF GENE EXPRESSION; CRC Press, Boca Raton, Fla. (1988), for a description of these molecules).

[0259] Preferred potential antagonists include derivatives of the hyperimmune serum reactive antigens and fragments thereof of the invention.

[0260] As used herein the activity of a polypeptide according to the present invention is its capability to bind to any of its interaction partner or the extent of such capability to bind to its or any interaction partner.

[0261] In a particular aspect, the invention provides the use of the polypeptides according to the present invention hyperimmune serum reactive antigens and fragments thereof, nucleic acid molecules or inhibitors of the invention to interfere with the initial physical interaction between a pathogen and mammalian host responsible for sequelae of infection. In particular the molecules of the invention may be used: i) in the prevention of adhesion of the Borrelia species as disclosed herein and more preferably the pathogenic species thereof such as B. burgdorferi s.s., B. afzelii and B. garinii to mammalian extracellular matrix proteins; ii) to block bacterial adhesion between mammalian extracellular matrix proteins and bacterial proteins which mediate tissue reaction; iii) or lead to evasion of immune defense; iv) to block the normal progression of pathogenesis in infections initiated other than by the implantation of in-dwelling devices or by other surgical techniques, e.g. through inhibiting nutrient acquisition.

[0262] Each of the DNA coding sequences provided herein may be used in the discovery, development and/or manufacture of antibacterial compounds. The encoded protein upon expression can be used as a target for the screening of antibacterial drugs. Additionally, the DNA sequences encoding the amino terminal regions of the encoded protein or Shine-Delgarno or other translation facilitating sequences of the respective mRNA can be used to construct antisense sequences to control the expression of the coding sequence of interest.

[0263] The antagonists and agonists may be employed, for instance, to inhibit diseases arising from infection with Borrelia species including B. burgdorferi s.s., B. afzelii and B. garinii such as Lyme borreliosis (Lyme disease).

[0264] In a still further aspect the present invention is related to an affinity device such affinity device comprises as least a support material and any of the polypeptides according to the present invention, which is attached to the support material. Because of the specificity of said polypeptides for their target cells or target molecules or their interaction partners, said polypeptides allow a selective removal of their interaction partner(s) from any kind of sample applied to the support material provided that the conditions for binding are met. The sample may be a biological or medical sample, including but not limited to, fermentation broth, cell debris, cell preparation, tissue preparation, organ preparation, blood, urine, lymph liquid, liquor and the like.

[0265] The polypeptides according to the present invention may be attached to the matrix in a covalent or non-covalent manner. Suitable support material is known to the one skilled in the art and can be selected from the group comprising cellulose, silicon, glass, aluminium, paramagnetic beads, starch and dextrane.

[0266] The present invention is further illustrated by the following figures, tables, examples and the sequence listing, from which further features, embodiments and advantages may be taken. It is to be understood that the present examples are given by way of illustration only and not by way of limitation of the disclosure.

[0267] In connection with the present invention

[0268] FIG. 1 shows the characterization of human sera as sources of pathogen specific antibodies.

[0269] FIG. 2 shows the characterization of the libraries.

[0270] FIG. 3 shows the selection of bacterial cells by MACS using biotinylated human IgGs.

[0271] FIG. 4 shows the PCR analysis to determine the gene distribution of selected antigens in clinical isolates of the respective bacterial pathogen.

[0272] FIG. 5 shows examples for induction of epitope-specific antibodies in mice by immunization with E. coli lysates.

[0273] FIG. 6 shows the sero-conversion in mice as determined by Western blot analysis.

[0274] Table 1 shows the summary of all screens performed with genomic B. afzelii libraries and human serum.

[0275] Table 2 shows all genes identified from B. afzelii as antigens with homologous from B. burgdorferi s.s. and B. garinii.

[0276] Table 3 shows the strains used for gene distribution analysis.

[0277] Table 4 shows the summary of the gene distribution analysis for a selected number of antigens in various strains of the respective bacterial species.

[0278] Table 5 shows the summary of mouse immunogenicity experiments.

[0279] Table 6 shows the summary of the peptide ELISA with human sera.

[0280] Table 7 FACS analysis with epitope sera generated in mice.

[0281] Table 8 Expressed and purified proteins tested in animals.

[0282] Table 9 Most probable number of cells (from Norman, R. L. and Kempe, L. L., 1960).

[0283] Table 10 Protection in mice.

[0284] The figures and tables to which it might be referred to in the specification are described in the following in more details.

[0285] FIG. 1 shows the characterization of human sera by measuring antibodies specific for B. burgdorferi s.s. and B. afzelii by immune assays. Total IgG antibody levels were measured by standard ELISA (A) using total bacterial lysates prepared from B. burgdorferi s.s. Serum samples from Lyme borreliosis patients with different symptoms were analysed at two different serum dilutions. Results of representative experiments are shown for the 25 sera included in the four different serum pools with sera from people with different symptoms of Lyme borreliosis (Erythema migrans (EM), Neuroborreliosis (NB), Lyme arthritis (LA) and acrodermitis chronica atrophicans (ACA)) and two pools with sera from patients with mixed symptomes (LBI and LBII). Data are expressed as ELISA units calculated from absorbance at 405 nm at a serum dilution in the linear range of detection. (B, C) Immunoblot analysis was performed on serum pools in order to ensure multiple immune reactivities with protein antigens. Results of a representative experiment using total bacterial lysate prepared from B. burgdorferi s.s. (B) or from B. afzelii (C) reacted with human sera at 5,000-fold dilution are shown. IgG antibodies were detected by anti-human IgG specific secondary reagents. —: incubation without primary antibody (serum pool), kDa: molecular weight marker.

[0286] FIG. 2 (A) shows the fragment size distribution of the B. afzelii small fragment genomic library, K78-LamB. After sequencing randomly selected clones, sequences were trimmed (428) to eliminate vector residues and the numbers of clones with various genomic fragment sizes were plotted. (B) shows the fragment size distribution of the B. afzelii large fragment genomic library, K78-FhuA. After sequencing randomly selected clones, sequences were trimmed (466) to eliminate vector residues and the numbers of clones with various genomic fragment sizes were plotted.

[0287] FIG. 3 (A) shows the MACS selection with the biotinylated human IgG pool with sera from patients with Erythema migrans (EM-IgG). The K78-FhuA library in pHIE11 was screened with 10-20 μg biotinylated IgG. As negative control, no serum was added to the library cells for screening. Number of cells selected after elution are shown. (B) shows the reactivity of specific clones (1-20) selected by bacterial surface display and Wt (pHIE11 without insert) as analysed by immunoblot analysis with the human serum IgG pool (EM-IgG) used for selection by MACS at a dilution of 1:3,000. Arrows indicate the clones detected as positive. As a loading control the same blot was also analysed with antibodies directed against the platform protein FhuA at a dilution of 1:5,000. (C) shows the MACS selection with the biotinylated human IgG pool with sera from patients with Lyme arthritis (LA-IgG) and the K78-FhuA library in pHIE11. (D) shows the reactivity of specific clones (1-20) selected by bacterial surface display and Wt (pHIE11 without insert) as analysed by immunoblot analysis with the human serum IgG pool (LA-IgG) used for selection by MACS at a dilution of 1:3,000. Arrows indicate the clones detected as positive.

[0288] FIG. 4 shows an example for the PCR analysis for the gene distribution of one gene with the respective oligonucleotides and 30 B. burgdorferi s.l. strains. The predicted size of the PCR fragment derived from antigen BAP004 from B. burgdorferi s.l. is 420 bp. 1-30, strains or clinical isolates as shown in Table 3; —, no genomic DNA added.

[0289] FIG. 5 shows the measurement of epitope-specific mouse serum IgG antibody levels induced by total bacterial lysates of LamB or FhuA expressing E. coli clones with B. afzelii-derived epitopes. The figure shows a representative peptide ELISA experiment with three sets of mouse sera (pools of 5 mice in each group) generated by epitopes expressed by bacterial clones Baf2 (BA0210), Baf12 (BA0149) and Baf36 (BA0181), respectively. Sera were tested at two different dilutions (200× and 1000×) against overlapping peptides covering the epitopes. Black bars, 200×; white bars, 1000×. Designation of the biotin-labelled synthetic peptides corresponding to the respective epitopes tested are shown below the dilutions.

[0290] FIG. 6 shows the sero-conversion as determined by Western blot analysis. As example for the determination of the infectious status of mice by Western blot analysis, sera from mice immunized with either the Borrelia antigen BbuA0034-1 or adjuvant in PBS buffer (PBS) are shown. Nitrocellulose membrane with total Borrelia cell lysate was cut into strips which were incubated with the individual mouse sera (1-10) from each group. Sero-conversion (infection) is indicated with a + (plus) and uninfected with a − (minus). kDa: kilo Dalton.

Table 1: Immunogenic Proteins Identified from B. afzelii by Bacterial Surface Display.

[0291] A: 300 bp library of B. afzelii in fhuA with the LBI-IgG pool containing the P1755, P1766, P1772, P1806 and P1811 sera (358), B: 300 bp library of B. afzelii in fhuA with the EM-IgG pool containing the P3055, P3144, P3186 and P3219 sera (336), C: 300 bp library of B. afzelii in fhuA with the NB-IgG pool containing the P3077, P3084, P3286, P3288 and P3337 sera (597), D: 300 bp library of B. afzelii in fhuA with the LBII-IgG pool containing the P3016, P3150, P3301, P3344 and P3394 sera (634), E: 300 bp library of B. afzelii in fhuA with the ACA-IgG pool containing P3183, P3209 and P3336 sera (665), F: 300 bp library of B. afzelii in fhuA with the LA-IgG pool containing P3120, P3239 and P3251 sera (616), G: 50 bp library of B. afzelii in lamB with the LBI-IgG pool (412), H: 50 bp library of B. afzelii in lamB with the EM-IgG pool (300), I: 50 bp library of B. afzelii in lamB with the NB-IgG pool (467), J: 50 bp library of B. afzelii in lamB with the LBII-IgG pool (435), K: 50 bp library of B. afzelii in lamB with the ACA-IgG pool (357), L: 50 bp library of B. afzelii in lamB with the LA-IgG pool (349); *, prediction of antigenic sequences longer than 5 amino acids was performed with the program ANTIGENIC (Kolaskar, A. et al., 1990). Listed are the genes from B. afzelii as identified by BLAST of the determined epitope sequence against the genomic sequence of B. afzelii, B. burgdorferi s.s. and B. garinii.

TABLE 1

| | | | | | Location of | |
|---|---|---|---|---|---|---|
| B. afzelii | Putative | | No. of | | identified | Seq ID |
| antigenic | function (by | Predicted | selected | Ident. in | immunogenic | (DNA, |
| protein | homology) | immunogenic aa* | clones | Screen | region (aa) | Prot.) |
| BA0056 | hypothetical | 6-20, 25-51, 58-83, | 9 | C, D, E, F | 128-169, | 1, 135 |
| | protein | 94-105, 111-122, | | | 257-336, | |
| | | 127-135, 141-155, | | | 339-379 | |
| | | 162-173, 179-186, | | | | |
| | | 188-207, 213-226, | | | | |
| | | 230-248, 253-265, | | | | |
| | | 269-282, 285-291, | | | | |
| | | 367-378, 384-393, | | | | |
| | | 401-425, 453-464, | | | | |
| | | 471-477, 504-514, | | | | |
| | | 519-527, 532-555, | | | | |
| | | 557-572, 584-598, | | | | |
| | | 609-616, 624-630, | | | | |
| | | 638-645, 648-653 | | | | |
| BA0060 | hypothetical | 23-31, 47-53, 57-64, | 9 | I | 180-189 | 2, 136 |
| | protein | 74-89, 91-106, | | | | |
| | | 127-132, 137-144, | | | | |
| | | 152-157, 164-169, | | | | |
| | | 186-192, 201-206, | | | | |
| | | 208-217, 223-235 | | | | |
| BA0062 | methionyl- | 4-32, 43-52, 54-66, | 2 | A, C, I | 159-213 | 3, 137 |
| | tRNA | 78-88, 91-122, | | | | |
| | formyltransferase | 124-131, 144-150, | | | | |
| | (fmt) | 153-159, 161-178, | | | | |
| | | 183-191, 195-201, | | | | |
| | | 205-215, 236-252, | | | | |
| | | 258-263, 276-284, | | | | |
| | | 288-294, 302-312 | | | | |
| BA0072 | peptide chain | 8-23, 30-35, 44-54, | 5 | B, C, E, F | 229-267 | 4, 138 |
| | release factor | 65-73, 77-83, | | | | |
| | 2 (prfB) | 89-110, 117-129, | | | | |
| | | 132-137, 156-165, | | | | |
| | | 169-175, 189-199, | | | | |
| | | 225-237 | | | | |
| BA0075 | predicted | 5-31, 40-50, 52-58, | 4 | A, B, E | 138-187 | 5, 139 |
| | coding region | 64-72, 112-118, | | | | |
| | | 137-142, 170-175, | | | | |
| | | 179-185, 192-201, | | | | |
| | | 299-305 | | | | |
| BA0078 | conserved | 11-18, 23-47, 113-119, | 5 | A, C | 97-177 | 6, 140 |
| | hypothetical | 131-137, 143-149, | | | | |
| | protein | 197-203, 215-222, | | | | |
| | | 247-256, 264-290, | | | | |
| | | 298-303, 311-358, | | | | |
| | | 368-401, 403-409 | | | | |
| BA0087 | V-type | 5-20, 27-32, 34-40, | 4 | L | 94-119 | 7, 141 |
| | ATPase, | 43-64, 66-72, | | | | |
| | subunit K, | 78-85, 91-97, 104-110, | | | | |
| | putative | 118-141 | | | | |
| BA0091 | V-type | 5-22, 25-32, 39-45, | 3 | D | 195-228 | 8, 142 |
| | ATPase, | 51-58, 60-104, | | | | |
| | subunit A | 106-114, 129-155, | | | | |
| | (atpA) | 160-166, 174-182, | | | | |
| | | 195-204, 207-213, | | | | |
| | | 223-239, 243-250, | | | | |
| | | 257-267, 270-276, | | | | |
| | | 279-285, 293-302, | | | | |
| | | 304-317, 328-335, | | | | |
| | | 360-372, 374-382, | | | | |
| | | 386-397, 404-418, | | | | |
| | | 429-438, 441-447, | | | | |
| | | 450-460, 467-472, | | | | |
| | | 480-497, 501-507, | | | | |
| | | 515-521, 562-572 | | | | |
| BA0106 | acetyl-CoA | 4-10, 31-42, 44-59, | 3 | A, E | 165-214 | 9, 143 |
| | C- | 65-72, 75-115, | | | | |
| | acetyltransferase | 119-127, 146-155, | | | | |
| | (fadA) | 181-188, 198-207, | | | | |
| | | 213-219, 228-244, | | | | |
| | | 254-264, 269-293, | | | | |
| | | 295-310, 313-321, | | | | |
| | | 323-336, 350-369, | | | | |
| | | 380-389 | | | | |
| BA0126 | ribosomal | 11-25, 27-45, 66-73, | 4 | C, E | 350-451 | 10, 144 |
| | protein S1 | 75-85, 104-113, | | | | |
| | (rpsA) | 126-135, 143-154, | | | | |
| | | 160-166, 178-185, | | | | |
| | | 201-215, 231-245, | | | | |
| | | 254-261, 266-296, | | | | |
| | | 298-306, 308-332, | | | | |
| | | 339-344, 360-370, | | | | |
| | | 385-391, 412-419, | | | | |
| | | 449-457, 461-469, | | | | |
| | | 472-478, 495-505, | | | | |
| | | 511-518 | | | | |
| BA0135 | penicillin- | 14-35, 64-72, 81-87, | 10 | B, C, E | 41-107, 528-596 | 11, 145 |
| | binding | 90-99, 110-116, | | | | |
| | protein (pbp- | 137-152, 158-166, | | | | |
| | 1) | 171-178, 207-216, | | | | |
| | | 225-232, 239-250, | | | | |
| | | 264-271, 276-286, | | | | |
| | | 316-323, 325-343, | | | | |
| | | 350-356, 393-407, | | | | |
| | | 416-422, 440-445, | | | | |
| | | 448-453, 469-475, | | | | |
| | | 497-506, 509-529, | | | | |
| | | 537-543, 586-592, | | | | |
| | | 603-610 | | | | |
| BA0149 | flagellar | 56-62, 83-96, 161-167, | 71 | A, B, C, | 18-315 | 12, 146 |
| | filament 41 kDa | 170-179, 184-197, | | D, B, F, | | |
| | core | 205-214, 235-243, | | G, H, I, K | | |
| | protein (flaB) | 285-296, 302-308, | | | | |
| | | 324-333 | | | | |
| BA0150 | flagellar | 4-11, 35-41, 57-65 | 11 | A, C, E | 22-75, 110-148, | 13, 147 |
| | hook- | 82-88, 99-115, | | | 344-404 | |
| | associated | 118-124, 126-134, | | | | |
| | protein 2 | 146-151, 159-167, | | | | |
| | (fliD) | 174-180, 187-192, | | | | |
| | | 195-206, 216-222, | | | | |
| | | 237-247, 261-269, | | | | |
| | | 295-304, 327-334, | | | | |
| | | 341-347, 363-374, | | | | |
| | | 382-388, 398-404, | | | | |
| | | 410-424, 430-436, | | | | |
| | | 441-448, 451-461, | | | | |
| | | 473-484, 493-507, | | | | |
| | | 509-522, 528-536, | | | | |
| | | 544-550, 566-573, | | | | |
| | | 588-604, 608-614 | | | | |
| BA0152 | N- | 4-14, 21-28, 32-38, | 6 | E | 264-328 | 14, 148 |
| | acetylglucosamine- | 59-71, 84-106, | | | | |
| | 6- | 110-120, 127-140, | | | | |
| | phosphate | 146-167, 184-190, | | | | |
| | deacetylase | 197-203, 223-232, | | | | |
| | (nagA) | 249-278, 280-292, | | | | |
| | | 309-324, 342-355, | | | | |
| | | 367-374, 377-384 | | | | |
| BA0181 | flagellar | 13-18, 47-55, 65-75, | 6 | A, B, C, F | 6-65, 68-112, | 15, 149 |
| | hook- | 132-138, 140-146, | | | 261-352, | |
| | associated | 149-155, 157-168, | | | 449-507 | |
| | protein (flgK) | 218-227, 241-248, | | | | |
| | | 275-281, 283-289, | | | | |
| | | 306-315, 329-336, | | | | |
| | | 352-360, 372-378, | | | | |
| | | 388-394, 396-404, | | | | |
| | | 411-416, 424-429, | | | | |
| | | 445-455, 479-491, | | | | |
| | | 494-500, 571-578, | | | | |
| | | 583-588, 600-621 | | | | |
| BA0192 | hypothetical | 10-34, 36-42, 46-55, | 9 | J | 79-89 | 16, 150 |
| | protein | 58-64, 79-86, | | | | |
| | | 99-122, 125-135, | | | | |
| | | 165-184, 200-209, | | | | |
| | | 215-226, 232-238 | | | | |
| BA0200 | D-alanine-- | 4-34, 38-62, 64-78, | 3 | K | 111-138 | 17, 151 |
| | D-alanine | 87-99, 101-109, | | | | |
| | ligase (ddlA) | 113-125, 128-156, | | | | |
| | | 166-184, 186-193, | | | | |
| | | 196-203, 205-215, | | | | |
| | | 220-226, 236-260, | | | | |
| | | 262-269, 271-288, | | | | |
| | | 296-302, 325-333, | | | | |
| | | 339-350 | | | | |
| BA0210 | surface- | 8-23, 25-33, 57-68, | 39 | A, B, C, | 102-177, | 18, 152 |
| | located | 102-113, 194-199, | | D, E, F | 285-364, | |
| | membrane | 236-241, 269-296, | | | 937-983 | |
| | protein 1 | 326-333, 339-348, | | | | |
| | (lmp1) | 352-360, 364-369, | | | | |
| | | 378-393, 422-430, | | | | |
| | | 434-447, 476-484, | | | | |
| | | 488-501, 530-538, | | | | |
| | | 542-555, 585-592, | | | | |
| | | 596-609, 638-646, | | | | |
| | | 650-663, 692-699, | | | | |
| | | 706-716, 726-745, | | | | |
| | | 765-771, 792-798, | | | | |
| | | 809-815, 825-835, | | | | |
| | | 862-868, 878-885, | | | | |
| | | 893-902, 911-922, | | | | |
| | | 927-937, 947-953, | | | | |
| | | 962-970, 978-985, | | | | |
| | | 1011-1017, | | | | |
| | | 1027-1034, 1045-1052 | | | | |
| BA0215 | phosphate | 4-20, 36-45, 62-69, | 7 | A, C, D, E | 80-159 | 19, 153 |
| | ABC | 73-83, 95-112, | | | | |
| | transporter, | 153-166, 178-185, | | | | |
| | periplasmic | 194-205, 215-223, | | | | |
| | phosphate- | 238-247 | | | | |
| | binding | | | | | |
| | protein (pstS) | | | | | |
| BA0221 | flagellar | 82-95, 107-122, | 11 | A, C, D, E | 245-299 | 20, 154 |
| | motor switch | 153-158, 165-171, | | | | |
| | protein (fliG- | 178-196, 202-210, | | | | |
| | 1) | 216-222, 270-280, | | | | |
| | | 312-318, 336-341, | | | | |
| | | 381-389 | | | | |
| BA0235 | hypothetical | 4-23, 45-57, 68-81, | 5 | D, E | 126-200 | 21, 155 |
| | protein | 91-104, 118-131, | | | | |
| | | 134-144, 160-166, | | | | |
| | | 172-189, 191-202, | | | | |
| | | 204-217, 228-236, | | | | |
| | | 261-268, 273-285, | | | | |
| | | 287-294, 307-316, | | | | |
| | | 328-343, 350-356, | | | | |
| | | 381-418, 420-429, | | | | |
| | | 440-452, 458-465, | | | | |
| | | 497-504, 528-538, | | | | |
| | | 546-556, 567-574, | | | | |
| | | 580-601, 605-624, | | | | |
| | | 628-639, 647-653 | | | | |
| BA0237 | hypothetical | 4-19, 24-30, 32-48, | 17 | B, D, E, | 15-146 | 22, 156 |
| | protein | 53-80, 89-97, | | F, K | | |
| | | 102-109, 136-142, | | | | |
| | | 145-153, 156-164, | | | | |
| | | 177-187, 192-209, | | | | |
| | | 215-221, 238-243 | | | | |
| BA0283 | flagellar hook | 5-13, 70-79, 91-97, | 6 | B, C, D | 35-109, 187-298 | 23, 157 |
| | protein (flgE) | 123-129, 155-162, | | | | |
| | | 173-189, 199-224, | | | | |
| | | 232-238, 255-261, | | | | |
| | | 265-283, 290-301, | | | | |
| | | 306-311, 314-320, | | | | |
| | | 336-344, 351-358, | | | | |
| | | 395-409, 412-418, | | | | |
| | | 430-439 | | | | |
| BA0295 | heat shock | 13-31, 36-47, 80-96, | 6 | B, C, D | 220-288 | 24, 158 |
| | protein | 98-107, 144-149, | | | | |
| | (hslU) | 187-193, 215-220, | | | | |
| | | 235-251, 291-300, | | | | |
| | | 306-326, 328-338, | | | | |
| | | 340-358, 364-380, | | | | |
| | | 408-426, 434-441 | | | | |
| BA0314 | hypothetical | 4-24, 36-43, 70-81, | 4 | C, D | 31-89 | 25, 159 |
| | protein | 89-100, 109-120, | | | | |
| | | 127-132, 141-158, | | | | |
| | | 165-178, 183-191, | | | | |
| | | 193-202, 208-215 | | | | |
| BA0321 | hypothetical | 6-25, 44-49, 95-105, | 7 | A, B, D, F | 83-172, 272-327 | 26, 160 |
| | protein | 136-144, 199-215, | | | | |
| | | 236-241, 256-262, | | | | |
| | | 280-287, 306-320, | | | | |
| | | 326-334, 346-354, | | | | |
| | | 364-376 | | | | |
| BA0327 | oligopeptide | 4-21, 27-44, 85-92, | 40 | A, B, C, | 20-79, 404-526 | 27, 161 |
| | ABC | 100-107, 112-118, | | D, E, F | | |
| | transporter, | 142-149, 161-190, | | | | |
| | periplasmic | 216-222, 231-238, | | | | |
| | oligopeptide- | 258-310, 317-323, | | | | |
| | binding | 334-344, 352-359, | | | | |
| | protein | 367-373, 380-387, | | | | |
| | (oppA-2) | 394-400, 429-441, | | | | |
| | | 485-500 | | | | |
| BA0329 | oligopeptide | 12-28, 38-58, 61-75, | 9 | C, D, E | 40-97, 251-297, | 28, 162 |
| | ABC | 98-116, 121-127, | | | 420-488 | |
| | transporter, | 133-142, 169-199, | | | | |
| | periplasmic | 213-221, 236-241, | | | | |
| | oligopeptide- | 243-250, 254-260, | | | | |
| | binding | 269-281, 284-301, | | | | |
| | protein | 313-319, 352-358, | | | | |
| | (oppA-3) | 362-368, 391-397, | | | | |
| | | 436-448, 455-463, | | | | |
| | | 485-496, 498-511, | | | | |
| | | 523-533 | | | | |
| BA0343 | hypothetical | 8-15, 24-41, 50-79, | 3 | D | 258-336 | 29, 163 |
| | protein | 86-91, 109-141, | | | | |
| | | 143-156, 166-171, | | | | |
| | | 204-212, 235-243, | | | | |
| | | 245-267, 291-311, | | | | |
| | | 328-336, 344-360, | | | | |
| | | 377-388, 390-396 | | | | |
| BA0345 | fibronectin/fibrinogen- | 4-15, 22-38, 46-53, | 7 | H, I, J | 458-472 | 30, 164 |
| | binding | 72-82, 99-119, | | | | |
| | protein, | 131-139, 148-154, | | | | |
| | putative | 179-184, 187-195, | | | | |
| | | 203-209, 212-219, | | | | |
| | | 223-231, 242-249, | | | | |
| | | 257-263, 269-277, | | | | |
| | | 282-288, 310-315, | | | | |
| | | 346-353, 371-377, | | | | |
| | | 388-395, 400-421, | | | | |
| | | 427-438, 445-451 | | | | |
| BA0351 | hypothetical | 5-29, 37-117, 128-134, | 7 | A, B, C, D | 197-284 | 31, 165 |
| | protein | 138-144, 146-161, | | | | |
| | | 172-178, 193-219, | | | | |
| | | 221-231, 234-240, | | | | |
| | | 242-261, 263-274, | | | | |
| | | 297-302, 306-322, | | | | |
| | | 339-345, 356-365, | | | | |
| | | 371-383, 402-413, | | | | |
| | | 416-424, 432-443, | | | | |
| | | 447-456, 461-466, | | | | |
| | | 471-524, 532-593 | | | | |
| BA0356 | carboxyl- | 5-29, 54-69, 72-88, | 9 | A, B, E, F | 378-461 | 32, 166 |
| | terminal | 99-112, 128-138, | | | | |
| | protease (ctp) | 150-165, 167-174, | | | | |
| | | 181-187, 205-226, | | | | |
| | | 246-253, 273-279, | | | | |
| | | 285-291, 293-311, | | | | |
| | | 313-323, 329-334, | | | | |
| | | 338-350, 356-363, | | | | |
| | | 366-372, 388-394, | | | | |
| | | 397-404, 417-423, | | | | |
| | | 437-445, 453-473 | | | | |
| BA0364 | aminopeptidase | 38-45, 67-82, 90-96, | 7 | A, B, C | 82-127, 212-253 | 33, 167 |
| | I (yscI) | 101-108, 113-120, | | | | |
| | | 128-143, 160-173, | | | | |
| | | 190-200, 206-218, | | | | |
| | | 226-237, 244-252, | | | | |
| | | 256-271, 276-285, | | | | |
| | | 298-309, 319-325, | | | | |
| | | 332-350, 355-363, | | | | |
| | | 379-388, 395-404, | | | | |
| | | 412-419, 427-433, | | | | |
| | | 442-455 | | | | |
| BA0380 | basic | 10-28, 37-50, 58-66, | 6 | B, D | 26-73 | 34, 168 |
| | membrane | 72-91, 101-119, | | | | |
| | protein B | 124-131, 133-149, | | | | |
| | (bmpB) | 152-170, 177-186, | | | | |
| | | 198-204, 225-244, | | | | |
| | | 249-256, 260-266, | | | | |
| | | 269-286, 298-303, | | | | |
| | | 306-312, 329-338, | | | | |
| | | 342-348 | | | | |
| BA0388 | DNA- | 10-18, 45-51, 58-87, | 5 | A, E | 1053-1082 | 35, 169 |
| | directed RNA | 95-139, 175-182, | | | | |
| | polymerase | 184-194, 228-237, | | | | |
| | (rpoC) | 239-245, 255-261, | | | | |
| | | 269-282, 289-295, | | | | |
| | | 301-308, 310-319, | | | | |
| | | 333-374, 376-383, | | | | |
| | | 394-447, 455-464, | | | | |
| | | 485-503, 519-526, | | | | |
| | | 532-542, 551-557, | | | | |
| | | 571-604, 608-614, | | | | |
| | | 616-623, 654-660, | | | | |
| | | 682-687, 717-724, | | | | |
| | | 729-736, 759-775, | | | | |
| | | 800-806, 817-823, | | | | |
| | | 829-838, 840-864, | | | | |
| | | 877-887, 900-906, | | | | |
| | | 943-951, 959-978, | | | | |
| | | 981-994, 996-1012, | | | | |
| | | 1016-1032, | | | | |
| | | 1035-1046, 1049-1056, | | | | |
| | | 1078-1109, | | | | |
| | | 1117-1124, 1137-1143, | | | | |
| | | 1158-1167, | | | | |
| | | 1179-1199, 1201-1207, | | | | |
| | | 1215-1245, | | | | |
| | | 1250-1256, 1262-1268, | | | | |
| | | 1270-1281, | | | | |
| | | 1298-1310, 1314-1323, | | | | |
| | | 1326-1333, | | | | |
| | | 1347-1357, 1364-1372 | | | | |
| BA0389 | DNA- | 4-9, 15-27, 29-37, | 6 | C, D, E | 194-292 | 36, 170 |
| | directed RNA | 50-59, 65-73, 94-107, | | | | |
| | polymerase | 138-168, 179-187, | | | | |
| | (rpoB) | 191-203, 230-237, | | | | |
| | | 254-260, 267-274, | | | | |
| | | 279-294, 312-328, | | | | |
| | | 355-361, 368-375, | | | | |
| | | 378-388, 405-415, | | | | |
| | | 441-457, 459-467, | | | | |
| | | 469-476, 496-506, | | | | |
| | | 508-514, 521-531, | | | | |
| | | 538-549, 554-561, | | | | |
| | | 566-574, 582-591, | | | | |
| | | 604-625, 640-653, | | | | |
| | | 657-671, 674-689, | | | | |
| | | 698-705, 713-723, | | | | |
| | | 746-756, 763-771, | | | | |
| | | 777-789, 801-809, | | | | |
| | | 822-839, 847-854, | | | | |
| | | 865-872, 877-883, | | | | |
| | | 889-906, 922-940, | | | | |
| | | 943-953, 963-984, | | | | |
| | | 1004-1010, | | | | |
| | | 1021-1037, 1045-1057, | | | | |
| | | 1070-1089, | | | | |
| | | 1096-1115, 1117-1123, | | | | |
| | | 1127-1135 | | | | |
| BA0417 | predicted | 10-30, 38-51, 74-81, | 5 | B, C, E, F | 44-99 | 37, 171 |
| | coding region | 86-96, 116-148, | | | | |
| | | 161-167, 202-208, | | | | |
| | | 211-217, 239-261, | | | | |
| | | 283-295, 298-310, | | | | |
| | | 322-328, 335-346 | | | | |
| BA0419 | sensory | 9-23, 31-42, 50-60, | 7 | B, E, F | 1229-1275 | 38, 172 |
| | transduction | 68-74, 85-92, | | | | |
| | histidine | 98-106, 108-117, | | | | |
| | kinase, | 135-142, 144-150, | | | | |
| | putative | 155-172, 174-191, | | | | |
| | | 193-206, 208-215, | | | | |
| | | 223-233, 237-245, | | | | |
| | | 252-267, 274-296, | | | | |
| | | 308-316, 324-341, | | | | |
| | | 375-385, 394-402, | | | | |
| | | 419-440, 446-452, | | | | |
| | | 493-499, 514-520, | | | | |
| | | 537-546, 570-579, | | | | |
| | | 582-588, 591-603, | | | | |
| | | 609-618, 620-628, | | | | |
| | | 640-687, 700-706, | | | | |
| | | 714-742, 765-774, | | | | |
| | | 794-805, 809-825, | | | | |
| | | 827-838, 847-857, | | | | |
| | | 860-867, 875-888, | | | | |
| | | 897-907, 917-926, | | | | |
| | | 937-942, 950-971, | | | | |
| | | 975-981, 989-999, | | | | |
| | | 1016-1052, 1054-1071, | | | | |
| | | 1089-1105, | | | | |
| | | 1108-1130, 1142-1160, | | | | |
| | | 1166-1178, | | | | |
| | | 1184-1197, 1199-1207, | | | | |
| | | 1216-1222, | | | | |
| | | 1232-1247, 1249-1254, | | | | |
| | | 1262-1283, | | | | |
| | | 1291-1300, 1308-1332, | | | | |
| | | 1343-1356, | | | | |
| | | 1363-1368, 1384-1398, | | | | |
| | | 1401-1410, | | | | |
| | | 1423-1434, 1443-1464, | | | | |
| | | 1478-1484 | | | | |
| BA0429 | stage 0 | 5-15, 21-35, 42-51, | 9 | C, I, J | 110-131, | 39, 173 |
| | sporulation | 55-60, 73-80, | | | 179-236 | |
| | protein J | 87-94, 103-110, | | | | |
| | (spo0J) | 134-146, 157-168, | | | | |
| | | 174-188, 190-201, | | | | |
| | | 209-223, 250-257 | | | | |
| BA0431 | DNA gyrase, | 10-24, 30-48, 52-66, | 3 | B, C | 372-434 | 40, 174 |
| | subunit B | 90-100, 111-137, | | | | |
| | (gyrB) | 153-162, 166-175, | | | | |
| | | 184-190, 193-206, | | | | |
| | | 226-232, 238-248, | | | | |
| | | 250-260, 267-273, | | | | |
| | | 322-333, 349-382, | | | | |
| | | 402-413, 421-428, | | | | |
| | | 443-451, 470-480, | | | | |
| | | 487-498, 508-518, | | | | |
| | | 526-539, 544-549, | | | | |
| | | 568-574, 607-623, | | | | |
| | | 631-636 | | | | |
| BA0442 | aspartyl- | 20-28, 33-38, 45-77, | 3 | C, E | 439-464 | 41, 175 |
| | tRNA | 91-110, 124-130, | | | | |
| | synthetase | 137-162, 164-170, | | | | |
| | (aspS) | 175-183, 185-205, | | | | |
| | | 207-217, 235-240, | | | | |
| | | 254-269, 291-296, | | | | |
| | | 319-326, 342-354, | | | | |
| | | 374-381, 397-403, | | | | |
| | | 424-434, 442-455, | | | | |
| | | 469-484, 494-501, | | | | |
| | | 513-522, 529-534, | | | | |
| | | 546-556, 558-564 | | | | |
| BA0464 | hypothetical | 4-13, 15-21, 24-32, | 2 | A, E | 12-77 | 42, 176 |
| | protein | 40-45, 47-65, | | | | |
| | | 75-110, 114-123, | | | | |
| | | 133-142, 144-159, | | | | |
| | | 164-171, 187-215 | | | | |
| BA0469 | UDP-N- | 4-9, 25-44, 49-60, | 3 | D, E | 281-316 | 43, 177 |
| | acetylglucosamine | 72-82, 87-105, | | | | |
| | 1- | 125-138, 142-155, | | | | |
| | carboxyvinyltransferase | 171-179, 183-197, | | | | |
| | (murA) | 205-225, 232-244, | | | | |
| | | 256-270, 278-285, | | | | |
| | | 287-293, 310-333, | | | | |
| | | 339-345, 350-366, | | | | |
| | | 368-378, 381-392, | | | | |
| | | 397-404, 408-418 | | | | |
| BA0475 | ribosomal | 28-35, 95-116, | 3 | D, E | 33-78 | 44, 178 |
| | protein L4 | 138-146, 150-158, | | | | |
| | (rplD) | 174-203 | | | | |
| BA0507 | hypothetical | 4-23, 31-43, 58-64, | 8 | B, C, E, F | 718-788 | 45, 179 |
| | protein | 68-83, 93-103, | | | | |
| | | 121-135, 143-156, | | | | |
| | | 181-187, 227-238, | | | | |
| | | 251-264, 292-298, | | | | |
| | | 309-317, 326-333, | | | | |
| | | 351-357, 359-365, | | | | |
| | | 387-395, 400-407, | | | | |
| | | 431-437, 451-460, | | | | |
| | | 462-471, 496-508, | | | | |
| | | 519-526, 534-540, | | | | |
| | | 568-573, 608-618, | | | | |
| | | 620-627, 650-657, | | | | |
| | | 673-679, 690-702, | | | | |
| | | 705-714, 728-734, | | | | |
| | | 738-745, 758-764, | | | | |
| | | 776-782, 795-810, | | | | |
| | | 830-839, 882-904, | | | | |
| | | 911-926, 938-944, | | | | |
| | | 962-969, 975-984, | | | | |
| | | 999-1007, 1019-1025, | | | | |
| | | 1072-1090, | | | | |
| | | 1099-1111, 1172-1178, | | | | |
| | | 1232-1241, | | | | |
| | | 1245-1252, 1257-1266, | | | | |
| | | 1283-1288, | | | | |
| | | 1305-1311, 1370-1377, | | | | |
| | | 1392-1398, | | | | |
| | | 1412-1417, 1422-1434, | | | | |
| | | 1448-1458, | | | | |
| | | 1479-1487, 1529-1534, | | | | |
| | | 1570-1576, | | | | |
| | | 1582-1590, 1615-1622, | | | | |
| | | 1630-1645, | | | | |
| | | 1659-1668, 1700-1708, | | | | |
| | | 1730-1736, | | | | |
| | | 1756-1762, 1765-1776, | | | | |
| | | 1798-1803, | | | | |
| | | 1805-1819, 1831-1837, | | | | |
| | | 1872-1882, | | | | |
| | | 1926-1936, 1946-1952, | | | | |
| | | 1955-1961, | | | | |
| | | 1968-1980, 1995-2002, | | | | |
| | | 2035-2045, | | | | |
| | | 2048-2056, 2076-2083, | | | | |
| | | 2099-2107, | | | | |
| | | 2122-2128, 2146-2156 | | | | |
| BA0513 | heat shock | 12-19, 22-29, 37-43, | 23 | A, C, D, | 66-161, 494-576 | 46, 180 |
| | protein 70 | 48-56, 79-90, | | E, F, J, K | | |
| | (dnaK-2) | 114-119, 136-147, | | | | |
| | | 162-172, 174-180, | | | | |
| | | 186-194, 200-213, | | | | |
| | | 232-238, 275-282, | | | | |
| | | 288-297, 303-319, | | | | |
| | | 329-338, 341-351, | | | | |
| | | 363-371, 383-397, | | | | |
| | | 416-423, 430-438, | | | | |
| | | 454-472, 476-483, | | | | |
| | | 536-542, 576-581, | | | | |
| | | 626-632 | | | | |
| BA0514 | GrpE protein | 29-35, 48-56, 82-89, | 8 | D, E | 1-52 | 47, 181 |
| | (grpE) | 106-112, 118-126, | | | | |
| | | 144-149, 157-173, | | | | |
| | | 175-184 | | | | |
| BA0539 | hypothetical | 14-36, 48-54, 79-85, | 4 | C, F | 171-240 | 48, 182 |
| | protein | 149-159, 171-182, | | | | |
| | | 189-205, 211-217 | | | | |
| BA0546 | hypothetical | 9-23, 30-40, 56-70, | 4 | C, D | 363-430 | 49, 183 |
| | protein | 75-80, 97-103, | | | | |
| | | 111-117, 130-135, | | | | |
| | | 139-145, 149-160, | | | | |
| | | 250-256, 276-286, | | | | |
| | | 309-315, 326-331, | | | | |
| | | 364-376, 385-391, | | | | |
| | | 400-412, 429-434, | | | | |
| | | 446-462, 472-498 | | | | |
| BA0553 | heat shock | 4-28, 44-60, 73-81, | 12 | D, E, F | 215-283 | 50, 184 |
| | protein 90 | 88-94, 102-108, | | | | |
| | (htpG) | 119-127, 145-170, | | | | |
| | | 201-208, 220-227, | | | | |
| | | 229-239, 291-297, | | | | |
| | | 306-323, 327-335, | | | | |
| | | 342-369, 372-394, | | | | |
| | | 414-420, 427-445, | | | | |
| | | 456-462, 471-478, | | | | |
| | | 494-503, 505-510, | | | | |
| | | 536-542, 549-567, | | | | |
| | | 585-594, 614-627 | | | | |
| BA0564 | uridylate | 4-10, 27-33, 40-48, | 4 | I | 151-160 | 51, 185 |
| | kinase | 64-70, 82-96, | | | | |
| | (smbA) | 108-115, 123-131, | | | | |
| | | 171-176, 182-204 | | | | |
| BA0572 | DNA | 4-15, 19-36, 39-47, | 5 | B, C, F | 458-497 | 52, 186 |
| | polymerase | 51-57, 62-69, | | | | |
| | III, subunit | 77-84, 91-97, 103-112, | | | | |
| | alpha (dnaE) | 117-136, 148-168, | | | | |
| | | 189-195, 204-211, | | | | |
| | | 213-228, 234-243, | | | | |
| | | 268-274, 280-289, | | | | |
| | | 294-308, 314-335, | | | | |
| | | 341-349, 354-375, | | | | |
| | | 382-392, 394-405, | | | | |
| | | 419-424, 430-435, | | | | |
| | | 442-469, 479-489, | | | | |
| | | 500-507, 510-516, | | | | |
| | | 523-534, 536-545, | | | | |
| | | 560-579, 586-592, | | | | |
| | | 614-620, 639-649, | | | | |
| | | 652-663, 665-702, | | | | |
| | | 704-710, 727-732, | | | | |
| | | 743-755, 761-781, | | | | |
| | | 799-805, 810-816, | | | | |
| | | 842-851, 885-891, | | | | |
| | | 904-912, 924-931, | | | | |
| | | 933-946, 948-973, | | | | |
| | | 980-988, 990-1007, | | | | |
| | | 1017-1023, | | | | |
| | | 1027-1035, 1046-1055, | | | | |
| | | 1063-1074, | | | | |
| | | 1086-1091, 1095-1102, | | | | |
| | | 1116-1122, | | | | |
| | | 1149-1158 | | | | |
| BA0581 | pfs protein | 4-23, 26-32, 50-56, | 4 | B, E | 91-170 | 53, 187 |
| | (pfs-2) | 72-85, 87-104, | | | | |
| | | 106-113, 116-151, | | | | |
| | | 159-174, 176-184, | | | | |
| | | 187-194, 199-206, | | | | |
| | | 211-232, 242-261 | | | | |
| BA0596 | membrane- | 4-24, 53-58, 65-72, | 8 | B, C, D, | 36-119, 343-394 | 54, 188 |
| | associated | 84-96, 106-113, | | E, F | | |
| | protein p66 | 115-125, 149-154, | | | | |
| | | 176-191, 215-222, | | | | |
| | | 239-244, 267-275, | | | | |
| | | 278-304, 323-340, | | | | |
| | | 345-351, 416-424, | | | | |
| | | 449-455, 473-483, | | | | |
| | | 523-537, 540-556, | | | | |
| | | 564-583, 605-616 | | | | |
| BA0601 | aminoacyl- | 11-27, 45-52, 60-74, | 3 | B, C | 342-386 | 55, 189 |
| | histidine | 96-102, 123-136, | | | | |
| | dipeptidase | 140-155, 167-189, | | | | |
| | (pepD) | 194-201, 209-230, | | | | |
| | | 254-261, 264-284, | | | | |
| | | 289-294, 297-305, | | | | |
| | | 319-325, 338-343, | | | | |
| | | 349-361, 363-377, | | | | |
| | | 381-388, 396-409, | | | | |
| | | 413-422, 435-441, | | | | |
| | | 455-469 | | | | |
| BA0605 | ATP- | 9-45, 47-54, 72-78, | 8 | D, E | 156-286 | 56, 190 |
| | dependent | 81-96, 111-118, | | | | |
| | Clp protease, | 123-130, 133-143, | | | | |
| | subunit X | 148-154, 157-182, | | | | |
| | (clpX) | 202-215, 241-255, | | | | |
| | | 290-311, 316-334, | | | | |
| | | 340-346, 349-356, | | | | |
| | | 366-385, 387-400, | | | | |
| | | 403-411 | | | | |
| BA0606 | ATP- | 26-45, 62-70, 84-121, | 6 | A, B, C, E | 747-795 | 57, 191 |
| | dependent | 129-138, 146-168, | | | | |
| | protease LA | 182-188, 197-207, | | | | |
| | (lon-2) | 213-220, 222-229, | | | | |
| | | 246-257, 277-283, | | | | |
| | | 304-314, 328-336, | | | | |
| | | 348-371, 375-385, | | | | |
| | | 388-396, 409-421, | | | | |
| | | 429-438, 451-459, | | | | |
| | | 465-485, 501-528, | | | | |
| | | 530-536, 555-581, | | | | |
| | | 589-594, 607-614, | | | | |
| | | 620-626, 628-634, | | | | |
| | | 637-643, 650-658, | | | | |
| | | 665-671, 680-691, | | | | |
| | | 703-709, 721-742, | | | | |
| | | 746-758, 761-767, | | | | |
| | | 772-777, 784-790, | | | | |
| | | 796-810 | | | | |
| BA0619 | N- | 4-11, 15-37, 52-66, | 9 | A, B, C, | 75-223, 285-348 | 58, 192 |
| | acetylmuramoyl- | 79-90, 96-106, | | D, E, F | | |
| | L-alanine | 110-118, 124-137, | | | | |
| | amidase, | 152-160, 162-171, | | | | |
| | putative | 174-182, 200-209, | | | | |
| | | 215-222; 227-242, | | | | |
| | | 248-264, 284-308, | | | | |
| | | 325-340, 362-369, | | | | |
| | | 390-418, 420-426, | | | | |
| | | 440-454, 463-471, | | | | |
| | | 478-485, 490-512, | | | | |
| | | 517-532, 539-545, | | | | |
| | | 570-583, 591-605, | | | | |
| | | 621-630, 643-652, | | | | |
| | | 655-665, 684-694 | | | | |
| BA0643 | serine/threonine | 8-18, 25-57, 93-107, | 7 | J | 390-409 | 59, 193 |
| | kinase, | 121-128, 135-141, | | | | |
| | putative | 159-176, 183-191, | | | | |
| | | 202-223, 229-236, | | | | |
| | | 298-304, 332-340, | | | | |
| | | 359-368, 384-393, | | | | |
| | | 410-426, 434-439, | | | | |
| | | 444-449, 476-491, | | | | |
| | | 502-508, 511-523, | | | | |
| | | 525-533, 548-554 | | | | |
| BA0644 | heat shock | 13-31, 35-41, 50-58, | 7 | E | 6-100 | 60, 194 |
| | protein | 70-81, 91-100, | | | | |
| | (groEL) | 120-128, 143-149, | | | | |
| | | 185-191, 196-203, | | | | |
| | | 213-239, 241-251, | | | | |
| | | 256-277, 289-303, | | | | |
| | | 305-316, 364-388, | | | | |
| | | 394-403, 406-412, | | | | |
| | | 417-426, 440-446, | | | | |
| | | 462-469, 494-502, | | | | |
| | | 504-522 | | | | |
| BA0653 | phosphoglycerate | 7-14, 30-36, 43-52, | 6 | A, E, F | 168-223 | 61, 195 |
| | mutase | 54-65, 71-85, | | | | |
| | (gpmA) | 95-101, 113-119, | | | | |
| | | 121-127, 153-170, | | | | |
| | | 179-188, 191-200, | | | | |
| | | 204-210, 214-222, | | | | |
| | | 227-233, 244-250 | | | | |
| BA0663 | flagellar | 14-21, 25-39, 54-64, | 7 | C, D | 12-84 | 62, 196 |
| | filament | 74-99, 102-129, | | | | |
| | outer layer | 139-153, 159-166, | | | | |
| | protein (flaA) | 188-206, 214-220, | | | | |
| | | 236-243, 245-255, | | | | |
| | | 262-269, 276-295, | | | | |
| | | 300-309, 315-321, | | | | |
| | | 324-331 | | | | |
| BA0665 | purine- | 4-13, 26-33, 35-49, | 4 | H, I | 50-64 | 63, 197 |
| | binding | 55-68, 74-82, | | | | |
| | chemotaxis | 96-114, 116-148, | | | | |
| | protein | 150-161, 229-235, | | | | |
| | (cheW-3) | 237-254, 257-266, | | | | |
| | | 280-286, 305-312, | | | | |
| | | 320-337, 343-356, | | | | |
| | | 373-382, 384-427, | | | | |
| | | 433-439 | | | | |
| BA0675 | methyl- | 4-46, 53-78, 103-113, | 12 | B, C, D, | 28-73, 292-344, | 64, 198 |
| | accepting | 117-122, 144-149, | | F, G, H, | 531-608 | |
| | chemotaxis | 168-174, 176-183, | | I, J | | |
| | protein (mcp- | 193-200, 207-238, | | | | |
| | 4) | 252-259, 271-277, | | | | |
| | | 279-307, 315-326, | | | | |
| | | 330-391, 412-423, | | | | |
| | | 425-464, 472-478, | | | | |
| | | 508-526, 531-542, | | | | |
| | | 551-560, 562-576, | | | | |
| | | 584-593, 602-608, | | | | |
| | | 616-637, 658-666, | | | | |
| | | 714-719, 721-730 | | | | |
| BA0682 | phosphomevalonate | 4-21, 26-33, 69-78, | 2 | E | 223-272 | 65, 199 |
| | kinase, | 80-93, 109-125, | | | | |
| | putative | 127-134, 137-146, | | | | |
| | | 154-160, 162-169, | | | | |
| | | 173-182, 189-199, | | | | |
| | | 210-220, 224-242, | | | | |
| | | 246-278, 284-290, | | | | |
| | | 294-308 | | | | |
| BA0703 | DNA primase | 10-30, 33-42, 46-62, | 2 | B | 180-232 | 66, 200 |
| | (dnaG) | 64-70, 82-97, | | | | |
| | | 112-122, 124-130, | | | | |
| | | 138-145, 148-165, | | | | |
| | | 167-178, 186-192, | | | | |
| | | 196-209, 213-218, | | | | |
| | | 241-249, 258-276, | | | | |
| | | 279-288, 291-299, | | | | |
| | | 302-307, 315-337, | | | | |
| | | 344-349, 360-376, | | | | |
| | | 390-402, 409-415, | | | | |
| | | 417-428, 452-468, | | | | |
| | | 475-484, 486-492 | | | | |
| BA0733 | conserved | 17-24, 32-43, 49-55, | 9 | J | 117-131 | 67, 201 |
| | hypothetical | 62-69, 78-92, | | | | |
| | protein | 97-118, 132-139, | | | | |
| | | 148-154, 173-179, | | | | |
| | | 181-189, 191-210 | | | | |
| BA0737 | antigen, | 4-18, 35-44, 54-67, | 54 | A, B, C, | 252-396 | 68, 202 |
| | p83/100 | 77-85, 92-101, | | D, E, F, | | |
| | | 106-119, 131-144, | | G, I, J, | | |
| | | 146-164, 171-177, | | K, L | | |
| | | 182-191, 203-218, | | | | |
| | | 282-288, 297-310, | | | | |
| | | 343-359, 361-367, | | | | |
| | | 400-405, 433-439, | | | | |
| | | 454-462, 483-492, | | | | |
| | | 496-504, 506-517, | | | | |
| | | 522-529, 552-559, | | | | |
| | | 564-572, 574-580, | | | | |
| | | 590-604, 625-660 | | | | |
| BA0745 | hypothetical | 33-50, 67-75, 89-95, | 5 | A, E, K | 115-166 | 69, 203 |
| | protein | 107-116, 119-126, | | | | |
| | | 151-158, 165-170, | | | | |
| | | 175-187, 237-243, | | | | |
| | | 252-258, 272-282, | | | | |
| | | 323-332 | | | | |
| BA0748 | ABC | 14-23, 41-53, 63-107, | 4 | C, F | 203-299 | 70, 204 |
| | transporter, | 111-134, 136-155, | | | | |
| | ATP-binding | 179-210, 223-233, | | | | |
| | protein | 261-267, 285-290, | | | | |
| | | 296-302 | | | | |
| BA0754 | hypothetical | 22-31, 35-41, 53-62, | 2 | I, K | 1-22 | 71, 205 |
| | protein | 64-75, 79-90 | | | | |
| BA0759 | hypothetical | 4-14, 17-30, 33-44, | 12 | B, C, D, | 1-35, 183-264 | 72, 206 |
| | protein | 54-62, 67-76, | | E, F, G, L | | |
| | | 78-97, 112-118, | | | | |
| | | 143-152, 163-169, | | | | |
| | | 175-188, 191-199, | | | | |
| | | 207-216, 232-239, | | | | |
| | | 243-249, 262-268, | | | | |
| | | 289-296, 312-319, | | | | |
| | | 335-340 | | | | |
| BA0767 | flagellar P- | 5-18, 37-53, 56-66, | 3 | C, D, E | 245-332 | 73, 207 |
| | ring protein | 74-81, 100-110, | | | | |
| | (flgI) | 120-131, 135-141, | | | | |
| | | 150-156, 174-181, | | | | |
| | | 189-196, 202-211, | | | | |
| | | 225-235, 246-251, | | | | |
| | | 255-260, 311-319, | | | | |
| | | 326-332 | | | | |
| BA0778 | hypothetical | 4-25, 28-34, 41-49, | 6 | C, D, F | 318-384 | 74, 208 |
| | protein | 71-78, 101-120, | | | | |
| | | 125-156, 167-173, | | | | |
| | | 190-199, 207-213, | | | | |
| | | 218-230, 256-267, | | | | |
| | | 269-275, 286-304, | | | | |
| | | 312-320, 341-349, | | | | |
| | | 363-371, 375-384 | | | | |
| BA0784 | cell division | 23-39, 48-58, 60-82, | 4 | B, D, F | 36-419 | 75, 209 |
| | protein (ftsH) | 85-104, 106-112, | | | | |
| | | 117-142, 181-191, | | | | |
| | | 205-213, 219-236, | | | | |
| | | 242-251, 263-276, | | | | |
| | | 295-302, 308-315, | | | | |
| | | 320-330, 335-343, | | | | |
| | | 363-372, 387-392, | | | | |
| | | 413-419, 430-457, | | | | |
| | | 462-470, 477-492, | | | | |
| | | 499-505, 531-540, | | | | |
| | | 542-548, 568-600, | | | | |
| | | 607-614, 620-630 | | | | |
| BA0790 | hypothetical | 9-50, 60-68, 70-78, | 8 | A, B, D, | 1372-1419 | 76, 210 |
| | protein | 84-100, 105-113, | | E, F | | |
| | | 125-133, 141-153, | | | | |
| | | 186-202, 204-209, | | | | |
| | | 212-219, 236-253, | | | | |
| | | 287-301, 310-317, | | | | |
| | | 319-327, 332-342, | | | | |
| | | 353-358, 364-396, | | | | |
| | | 422-430, 437-459, | | | | |
| | | 484-508, 510-520, | | | | |
| | | 535-543, 573-583, | | | | |
| | | 591-598, 610-621, | | | | |
| | | 629-640, 648-653, | | | | |
| | | 675-685, 691-708, | | | | |
| | | 728-735, 738-745, | | | | |
| | | 750-763, 765-773, | | | | |
| | | 790-797, 799-820, | | | | |
| | | 842-854, 857-864, | | | | |
| | | 880-885, 903-909, | | | | |
| | | 923-933, 939-951, | | | | |
| | | 980-986, 991-998, | | | | |
| | | 1019-1024, | | | | |
| | | 1026-1033, 1045-1051, | | | | |
| | | 1064-1075, | | | | |
| | | 1077-1094, 1100-1115, | | | | |
| | | 1139-1157, | | | | |
| | | 1163-1181, 1196-1202, | | | | |
| | | 1207-1213, | | | | |
| | | 1219-1225, 1241-1250, | | | | |
| | | 1275-1290, | | | | |
| | | 1304-1310, 1332-1347, | | | | |
| | | 1352-1365, | | | | |
| | | 1383-1405, 1421-1429, | | | | |
| | | 1433-1442 | | | | |
| BA0792 | hypothetical | 4-40, 60-65, 90-102, | 6 | B, D, E | 14-104 | 77, 211 |
| | protein | 125-138, 150-160, | | | | |
| | | 162-172 | | | | |
| BA0829 | hypothetical | 4-31, 37-53, 59-80, | 3 | B, E | 72-146 | 78, 212 |
| | protein | 87-93, 173-183, | | | | |
| | | 185-195, 219-233, | | | | |
| | | 239-247, 265-275 | | | | |
| BAP001 | hypothetical | 5-22, 38-46, 53-58, | 313 | A, B, C, | 15-106, 137-201 | 79, 213 |
| | protein | 69-78, 80-88, | | D, E, F, | | |
| | | 92-99, 117-124, | | G, H, I, | | |
| | | 142-151, 154-165, | | J, K, L | | |
| | | 189-196, 206-213, | | | | |
| | | 220-226, 288-309 | | | | |
| BAP002 | outer | 4-17, 37-47, 58-66, | 10 | A, D, F | 41-155 | 80, 214 |
| | membrane | 75-81, 83-89, | | | | |
| | protein | 106-116, 145-152, | | | | |
| | | 162-168 | | | | |
| BAP003 | antigen, S2 | 4-16, 50-57, 66-72, | 4 | A, B, D | 165-200 | 81, 215 |
| | | 92-100, 102-112, | | | | |
| | | 126-150, 156-167, | | | | |
| | | 194-204, 208-218, | | | | |
| | | 244-256 | | | | |
| BAP004 | hypothetical | 19-26, 38-51, 81-89, | 3 | G | 26-48 | 82, 216 |
| | protein | 96-103, 107-114, | | | | |
| | | 117-122, 128-134, | | | | |
| | | 150-158, 164-170 | | | | |
| BAP005 | decorin | 5-24, 30-35, 42-47, | 16 | A, F | 15-92 | 83, 217 |
| | binding | 74-86, 107-117, | | | | |
| | protein A | 146-156 | | | | |
| | (dbpA) | | | | | |
| BAP006 | oligopeptide | 5-22, 41-49, 55-65, | 10 | A, B, D, | 335-381, | 84, 218 |
| | ABC | 85-96, 100-106, | | E, F | 422-484 | |
| | transporter, | 111-117, 125-132, | | | | |
| | periplasmic | 150-155, 161-189, | | | | |
| | oligopeptide- | 204-212, 229-243, | | | | |
| | binding | 262-277, 286-296, | | | | |
| | protein | 304-311, 314-323, | | | | |
| | (oppAV) | 353-359, 367-373, | | | | |
| | | 391-397, 410-417, | | | | |
| | | 446-451, 485-500 | | | | |
| BAP007 | lipoprotein | 4-28, 37-43, 65-72, | 26 | A, B, C, | 50-215 | 85, 219 |
| | | 109-127, 140-148, | | D, E, F, | | |
| | | 155-166, 188-198 | | G, H | | |
| BAP008 | hypothetical | 4-24, 41-55, 71-79, | 36 | A, B, C, | 91-213 | 86, 220 |
| | protein | 84-89, 95-100, | | D, E, F | | |
| | | 113-125, 138-148, | | | | |
| | | 193-203, 215-221, | | | | |
| | | 300-306, 334-350, | | | | |
| | | 362-369, 385-396 | | | | |
| BAP009 | antigen, P35, | 4-24, 94-101, 103-112, | 6 | B, D, E | 25-76 | 87, 221 |
| | putative | 128-134, 141-148, | | | | |
| | | 156-165, 172-181, | | | | |
| | | 191-197, 281-290 | | | | |
| BAP010 | outer surface | 5-13, 19-25, 27-40, | 6 | C, D, E, F | 336-362 | 88, 222 |
| | protein, | 47-54, 63-69, | | | | |
| | putative | 84-98, 119-125, | | | | |
| | | 143-158, 170-182, | | | | |
| | | 199-205, 223-234, | | | | |
| | | 237-251, 257-265, | | | | |
| | | 287-292, 296-301, | | | | |
| | | 307-328, 336-352 | | | | |
| BAP011 | oligopeptide | 4-25, 29-36, 41-47, | 6 | C, D, E, F | 311-377 | 89, 223 |
| | ABC | 54-66, 88-95, | | | | |
| | transporter, | 97-110, 115-121, | | | | |
| | periplasmic | 127-135, 164-193, | | | | |
| | oligopeptide- | 203-220, 232-244, | | | | |
| | binding | 269-275, 278-284, | | | | |
| | protein | 289-316, 320-327, | | | | |
| | (oppAIV) | 336-342, 344-353, | | | | |
| | | 355-363, 370-378, | | | | |
| | | 436-442, 449-454, | | | | |
| | | 460-466, 478-489, | | | | |
| | | 492-505 | | | | |
| BAP012 | IMP | 12-34, 40-48, 84-90, | 4 | A, C, E, F | 331-386 | 90, 224 |
| | dehydrogenase | 131-138, 140-151, | | | | |
| | (guaB) | 157-175, 177-187, | | | | |
| | | 193-201, 207-261, | | | | |
| | | 267-281, 306-312, | | | | |
| | | 334-340, 343-349, | | | | |
| | | 352-357, 369-377, | | | | |
| | | 380-394 | | | | |
| BAP013 | outer surface | 6-20, 54-73, 97-116, | 12 | C, D, E, F | 116-212 | 91, 225 |
| | protein C | 129-135, 138-149, | | | | |
| | (ospC) | 173-191, 194-208 | | | | |
| BAP014 | hypothetical | 11-34, 41-48, 58-72, | 4 | K | 208-230 | 92, 226 |
| | protein | 82-88, 90-99, | | | | |
| | | 101-109, 137-145, | | | | |
| | | 161-168, 172-188, | | | | |
| | | 193-211, 215-221, | | | | |
| | | 260-269, 271-278, | | | | |
| | | 304-310, 317-327, | | | | |
| | | 336-351 | | | | |
| BAP015 | hypothetical | 4-13, 20-30, 73-83, | 61 | A, B, C, | 3-48, 576-739 | 93, 227 |
| | protein | 90-107, 117-137, | | D, E, F, | | |
| | | 226-236, 244-260, | | G, H, I, | | |
| | | 268-275, 286-293, | | J, K, L | | |
| | | 310-317, 324-330, | | | | |
| | | 340-367, 370-379, | | | | |
| | | 390-422, 427-442, | | | | |
| | | 497-505, 507-513, | | | | |
| | | 549-557, 569-576, | | | | |
| | | 585-593, 611-617, | | | | |
| | | 630-638, 647-657, | | | | |
| | | 659-666, 670-675, | | | | |
| | | 689-699, 726-736, | | | | |
| | | 769-774, 779-802, | | | | |
| | | 866-873, 886-894, | | | | |
| | | 934-940, 956-973, | | | | |
| | | 986-992, | | | | |
| | | 1009-1017, 1026-1041, | | | | |
| | | 1043-1050, | | | | |
| | | 1056-1068 | | | | |
| BAP016 | hypothetical | 10-19, 32-40, 42-48, | 2 | F | 32-72 | 94, 228 |
| | protein | 50-58, 75-85, | | | | |
| | | 88-97, 112-139 | | | | |
| BAP017 | hypothetical | 4-13, 20-27, 67-80, | 25 | A, C, D, | 324-391 | 95, 229 |
| | protein | 92-98, 101-107, | | E, G, I, | | |
| | | 114-123, 153-169, | | J, K, L | | |
| | | 174-181, 200-206, | | | | |
| | | 213-219, 226-242, | | | | |
| | | 248-254, 256-289, | | | | |
| | | 299-307, 310-316, | | | | |
| | | 320-326, 329-346, | | | | |
| | | 382-392 | | | | |
| BAP018 | hypothetical | 32-38, 40-47, 49-54, | 12 | A, C, D, | 104-143, | 96, 230 |
| | protein | 79-89, 95-101, | | E, F | 148-195 | |
| | | 110-117, 122-129, | | | | |
| | | 132-140, 151-157, | | | | |
| | | 178-197, 200-206, | | | | |
| | | 216-227, 249-257 | | | | |
| BAP019 | hypothetical | 10-16, 35-47, 52-77, | 18 | A, B, C, | 91-135, 282-299, | 97, 231 |
| | protein | 81-89, 104-109, | | D, E, F, | 445-477 | |
| | | 115-123, 132-149, | | I, K, L | | |
| | | 151-160, 163-184, | | | | |
| | | 197-213, 215-245, | | | | |
| | | 252-266, 294-304, | | | | |
| | | 310-337, 342-348, | | | | |
| | | 362-372, 393-398, | | | | |
| | | 408-430, 452-466, | | | | |
| | | 468-476, 485-491, | | | | |
| | | 497-506, 514-520, | | | | |
| | | 530-537, 539-557, | | | | |
| | | 592-606, 627-632, | | | | |
| | | 636-653, 674-688, | | | | |
| | | 693-731, 748-753, | | | | |
| | | 760-766, 783-797, | | | | |
| | | 805-814, 819-825, | | | | |
| | | 833-840, 843-851 | | | | |
| BAP020 | hypothetical | 11-22, 25-31, 55-65, | 17 | A, C, D, | 130-137 | 98, 232 |
| | protein | 83-107, 111-129 | | E, F, G, | | |
| | | | | H, I | | |
| BAP021 | hypothetical | 15-21, 24-43, 60-68, | 18 | C, D, E, F | 3-75 | 99, 233 |
| | protein | 86-95, 157-185, | | | | |
| | | 188-197 | | | | |
| BAP022 | hypothetical | 13-19, 35-44, 56-73, | 9 | A, C, D, | 400-429, | 100, |
| | protein | 79-92, 116-129, | | E, F | 521-545 | 234 |
| | | 143-158, 169-178, | | | | |
| | | 198-210, 215-221, | | | | |
| | | 238-243, 247-256, | | | | |
| | | 261-267, 270-294, | | | | |
| | | 310-320, 331-341, | | | | |
| | | 360-366, 377-387, | | | | |
| | | 397-406, 412-421, | | | | |
| | | 423-439, 449-455, | | | | |
| | | 458-465, 473-479, | | | | |
| | | 483-492, 510-525, | | | | |
| | | 561-569, 571-597, | | | | |
| | | 599-619, 635-641, | | | | |
| | | 686-704, 712-721, | | | | |
| | | 738-755, 761-767, | | | | |
| | | 781-794, 806-813, | | | | |
| | | 844-857, 862-873, | | | | |
| | | 875-882, 889-896, | | | | |
| | | 901-915, 921-931, | | | | |
| | | 937-943, 963-975, | | | | |
| | | 991-997, | | | | |
| | | 1001-1009, 1025-1032, | | | | |
| | | 1040-1046, | | | | |
| | | 1051-1056, 1073-1080, | | | | |
| | | 1096-1105, | | | | |
| | | 1112-1154, 1163-1170, | | | | |
| | | 1173-1180, | | | | |
| | | 1186-1197, 1203-1208, | | | | |
| | | 1224-1232, | | | | |
| | | 1237-1249, 1254-1261 | | | | |
| BAP023 | antigen, P35, | 6-30, 81-87, 117-128, | 5 | D, E, F | 61-122 | 101, |
| | putative | 134-142, 147-158, | | | | 235 |
| | | 178-186, 217-227, | | | | |
| | | 246-255 | | | | |
| BAP024 | immunogenic | 4-22, 31-38, 77-83, | 147 | A, B, C, | 8-232, 265-318 | 102, |
| | protein P35 | 130-137, 159-169, | | D, E, F, | | 236 |
| | | 188-194, 208-229, | | G, H, I, | | |
| | | 231-238, 272-283, | | J, K, L | | |
| | | 286-294, 308-315, | | | | |
| | | 317-336, 338-347 | | | | |
| BAP025 | hypothetical | 9-23, 26-34, 36-42, | 14 | A, C, D, E | 20-62, 95-181 | 103, |
| | protein | 73-94, 113-142, | | | | 237 |
| | | 186-192, 200-221, | | | | |
| | | 232-238, 246-252, | | | | |
| | | 254-279, 292-307, | | | | |
| | | 311-316 | | | | |
| BAP026 | hypothetical | 26-37, 58-67, 83-89, | 3 | A, C, D | 1-76 | 104, |
| | protein | 97-109, 114-141 | | | | 238 |
| BAP027 | hypothetical | 13-20, 28-35, 70-78, | 3 | B, C, D, F | 121-178 | 105, |
| | protein | 95-102, 156-169, | | | | 239 |
| | | 171-180 | | | | |
| BAP028 | hypothetical | 7-20, 32-41, 131-147, | 29 | A, B, C, | 195-259 | 106, |
| | protein | 156-166, 219-226, | | D, F, G | | 240 |
| | | 240-251, 259-270, | | | | |
| | | 275-282, 299-305, | | | | |
| | | 309-315, 336-342, | | | | |
| | | 344-350 | | | | |
| BAP029 | ErpB2 | 7-23, 37-44, 48-63, | 28 | GA, B, | 19-124, 160-232 | 107, |
| | protein | 93-102, 108-120, | | C, D, F, | | 241 |
| | | 138-145, 219-228, | | H, I, J, | | |
| | | 237-246, 251-270, | | K, L | | |
| | | 277-283, 292-300, | | | | |
| | | 317-323, 336-351, | | | | |
| | | 361-367 | | | | |
| BAP030 | hypothetical | 28-35, 40-47, 93-100, | 5 | C, D, F | 4-77 | 108, |
| | protein | 102-110, 158-182 | | | | 242 |
| BAP031 | erp protein | 8-32, 39-44, 104-110, | 56 | A, B, C, | 42-199 | 109, |
| | | 157-169, 183-196, | | E, G, I | | 243 |
| | | 212-217 | | | | |
| BAP032 | lipoprotein | 4-18, 49-56, 72-81, | 5 | A, B, D, E | 48-114 | 110, |
| | | 90-107, 127-133, | | | | 244 |
| | | 146-151 | | | | |
| BAP033 | outer | 4-22, 24-30, 42-53, | 8 | A, B, F | 97-173 | 111, |
| | membrane | 57-62, 66-80, | | | | 245 |
| | protein, | 83-90, 99-104, | | | | |
| | putative | 112-118, 132-148, | | | | |
| | | 168-175, 179-186 | | | | |
| BAP034 | hypothetical | 7-19, 33-43, 58-77, | 9 | A, B, C, | 14-63 | 112, |
| | protein | 85-91 | | D, E, F, | | 246 |
| | | | | G, J | | |
| BAP035 | hypothetical | 15-21, 24-35, 75-80, | 56 | A, B, C, | 7-136 | 113, |
| | protein | 123-128, 133-139, | | D, E, F, | | 247 |
| | | 148-172 | | G, J | | |
| BAP036 | hypothetical | 29-35, 51-56, 64-74, | 10 | A, C, D, F | 1-44 | 114, |
| | protein | 82-88, 100-106, | | | | 248 |
| | | 134-153 | | | | |
| BAP037 | hypothetical | 32-44, 65-72, 75-103, | 5 | A, D, E, F | 136-185 | 115, |
| | protein | 136-144, 159-166 | | | | 249 |
| BAP038 | hypothetical | 16-28, 40-53, 74-89, | 13 | A, D, E, | 3-151 | 116, |
| | protein | 108-114, 130-140, | | F, I, J, K | | 250 |
| | | 152-160, 168-177 | | | | |
| BAP039 | hypothetical | 5-27, 39-45, 57-65, | 11 | B, C, D, | 27-91 | 117, |
| | protein | 72-83, 130-135 | | G, K | | 251 |
| BAP040 | hypothetical | 16-22, 31-44, 52-67, | 8 | A, E | 22-78 | 118, |
| | protein | 79-84, 95-106, | | | | 252 |
| | | 119-127 | | | | |
| BAP041 | hypothetical | 4-23, 32-39, 45-53, | 45 | A, B, C, | 157-246 | 119, |
| | protein | 67-75, 83-89, | | D, E, F | | 253 |
| | | 97-112, 133-139, | | | | |
| | | 189-194, 200-205, | | | | |
| | | 241-247, 254-259, | | | | |
| | | 275-282, 287-308, | | | | |
| | | 311-316, 329-339, | | | | |
| | | 344-352 | | | | |
| BAP042 | hypothetical | 4-21, 24-30, 52-77, | 7 | D, F | 70-113 | 120, |
| | protein | 81-88, 97-102, | | | | 254 |
| | | 110-115, 125-137 | | | | |
| BAP043 | hypothetical | 4-20, 33-38, 44-56, | 23 | B, F | 13-91 | 121, |
| | protein | 73-81, 123-135, | | | | 255 |
| | | 159-166, 169-181, | | | | |
| | | 199-204 | | | | |
| BAP044 | hypothetical | 12-18, 23-31, 39-52, | 7 | A, D, F | 1-66 | 122, |
| | protein | 54-60, 63-74, | | | | 256 |
| | | 89-97, 99-111 | | | | |
| BAP045/ | associated | 4-19, 55-62, 76-94, | 4 | E | | 123, |
| BBS42 | protein A | 96-104, 109-126, | | | | 257 |
| | | 154-166 | | | | |
| CRFA006 | | 4-11, 26-39 | 4 | H, K, L | 11-19 | 124, |
| | | | | | | 258 |
| CRFA514 | | 4-21 | 2 | G | 15-24 | 125, |
| | | | | | | 259 |
| CRFA554 | | 12-25 | 24 | H, I | 23-45 | 126, |
| | | | | | | 260 |
| CRFA657 | | 4-23, 33-55, 59-64, | 6 | K | 54-78 | 127, |
| | | 76-93, 107-125, | | | | 261 |
| | | 129-138 | | | | |
| CRFA744 | | 4-27, 56-82 | 3 | K | 21-40 | 128, |
| | | | | | | 262 |
| CRFA762 | | 8-17, 24-36, 47-61, | 2 | J | 65-83 | 129, |
| | | 76-83 | | | | 263 |
| CRFA780 | | 4-22, 37-46, 54-60, | 2 | J | 13-25 | 130, |
| | | 64-70 | | | | 264 |
| CRFBD21 | | 9-17, 23-41, 64-86 | 4 | G | 6-25, 53-66 | 131, |
| | | | | | | 265 |
| CRFBI14 | | 4-23, 29-48 | 3 | I | 18-29 | 132, |
| | | | | | | 266 |
| CRFBO17 | | 9-20, 26-40, 44-51 | 3 | J | 40-60 | 133, |
| | | | | | | 267 |
| CRFP316 | | 4-9, 11-18, 20-31 | 2 | J | 4-21 | 134, |
| | | | | | | 268 |

Table 2: Immunogenic Proteins Identified from B. afzelii by Bacterial Surface Display and their Orthologs from B. burgdorferi s.s. and B. garinii.

[0292] Table 2 shows the identified genes from B. afzelii with the respective sequence identification numbers. The best matches in a Blast analysis from B. burgdorferi s.s. (http://www.tigr.org/tigr-scripts/CMR2/GenomePage3.spl?database=gbb) and B. garinii (http://sgb.imb-jena.de/cgi/index.pl) are listed together with their respective sequence identification numbers.

TABLE 2

| B. afzelii | | | B. burgdorferi s.s. | | | B. garinii | | |
|---|---|---|---|---|---|---|---|---|
| | Seq ID | Seq ID | | Seq ID | Seq ID | | Seq ID | Seq ID |
| ORF | (DNA) | (Protein) | ORF | (DNA) | (Protein) | ORF | (DNA) | (Protein) |
| BA0056 | 1 | 135 | BB0058 | 269 | 388 | BG0057 | 507 | 629 |
| BA0060 | 2 | 136 | BB0062 | 270 | 389 | BG0061 | 508 | 630 |
| BA0062 | 3 | 137 | BB0064 | 271 | 390 | BG0063 | 509 | 631 |
| BA0072 | 4 | 138 | BB0074 | 272 | 391 | BG0073 | 510 | 632 |
| BA0075 | 5 | 139 | BB0077 | 273 | 392 | BG0076 | 511 | 633 |
| BA0078 | 6 | 140 | BB0081 | 274 | 393 | BG0079 | 512 | 634 |
| BA0087 | 7 | 141 | BB0090 | 275 | 394 | BG0091 | 513 | 635 |
| BA0091 | 8 | 142 | BB0094 | 276 | 395 | BG0095 | 514 | 636 |
| BA0106 | 9 | 143 | BB0109 | 277 | 396 | BG0110 | 515 | 637 |
| BA0126 | 10 | 144 | BB0127 | 278 | 397 | BG0129 | 516 | 638 |
| BA0135 | 11 | 145 | BB0136 | 279 | 398 | BG0138 | 517 | 639 |
| BA0149 | 12 | 146 | BB0147 | 280 | 399 | BG0147 | 518 | 640 |
| BA0150 | 13 | 147 | BB0149 | 281 | 400 | BG0148 | 519 | 641 |
| BA0152 | 14 | 148 | BB0151 | 282 | 401 | BG0149 | 520 | 642 |
| BA0181 | 15 | 149 | BB0181 | 283 | 402 | BG0180 | 521 | 643 |
| BA0192 | 16 | 150 | BB0193 | 284 | 403 | BG0191 | 522 | 644 |
| BA0200 | 17 | 151 | BB0200 | 285 | 404 | BG0199 | 523 | 645 |
| BA0210 | 18 | 152 | BB0210 | 286 | 405 | BG0212 | 524 | 646 |
| BA0215 | 19 | 153 | BB0215 | 287 | 406 | BG0218 | 525 | 647 |
| BA0221 | 20 | 154 | BB0221 | 288 | 407 | BG0224 | 526 | 648 |
| BA0235 | 21 | 155 | BB0236 | 289 | 408 | BG0239 | 527 | 649 |
| BA0237 | 22 | 156 | BB0238 | 290 | 409 | BG0241 | 528 | 650 |
| BA0283 | 23 | 157 | BB0283 | 291 | 410 | BG0286 | 529 | 651 |
| BA0295 | 24 | 158 | BB0295 | 292 | 411 | BG0298 | 530 | 652 |
| BA0314 | 25 | 159 | BB0315 | 293 | 412 | BG0318 | 531 | 653 |
| BA0321 | 26 | 160 | BB0323 | 294 | 413 | BG0324 | 532 | 654 |
| BA0327 | 27 | 161 | BB0329 | 295 | 414 | BG0330 | 533 | 655 |
| BA0329 | 28 | 162 | BB0330 | 296 | 415 | BG0331 | 534 | 656 |
| BA0343 | 29 | 163 | BB0345 | 297 | 416 | BG0346 | 535 | 657 |
| BA0345 | 30 | 164 | BB0347 | 298 | 417 | BG0348 | 536 | 658 |
| BA0351 | 31 | 165 | BB0353 | 299 | 418 | BG0354 | 537 | 659 |
| BA0356 | 32 | 166 | BB0359 | 300 | 419 | BG0359 | 538 | 660 |
| BA0364 | 33 | 167 | BB0366 | 301 | 420 | BG0365 | 539 | 661 |
| BA0380 | 34 | 168 | BB0382 | 302 | 421 | BG0381 | 540 | 662 |
| BA0388 | 35 | 169 | BB0388 | 303 | 422 | BG0389 | 541 | 663 |
| BA0389 | 36 | 170 | BB0389 | 304 | 423 | BG0390 | 542 | 664 |
| BA0417 | 37 | 171 | BB0418 | 305 | 424 | BG0421 | 543 | 665 |
| BA0419 | 38 | 172 | BB0420 | 306 | 425 | BG0423 | 544 | 666 |
| BA0429 | 39 | 173 | BB0434 | 307 | 426 | BG0441 | 545 | 667 |
| BA0431 | 40 | 174 | BB0436 | 308 | 427 | BG0443 | 546 | 668 |
| BA0442 | 41 | 175 | BB0446 | 309 | 428 | BG0454 | 547 | 669 |
| BA0464 | 42 | 176 | BB0467 | 310 | 429 | BG0480 | 548 | 670 |
| BA0469 | 43 | 177 | BB0472 | 311 | 430 | BG0484 | 549 | 671 |
| BA0475 | 44 | 178 | BB0479 | 312 | 431 | BG0490 | 550 | 672 |
| BA0507 | 45 | 179 | BB0512 | 313 | 432 | BG0523 | 551 | 673 |
| BA0513 | 46 | 180 | BB0518 | 314 | 433 | BG0529 | 552 | 674 |
| BA0514 | 47 | 181 | BB0519 | 315 | 434 | BG0530 | 553 | 675 |
| BA0539 | 48 | 182 | BB0546 | 316 | 435 | BG0556 | 554 | 676 |
| BA0546 | 49 | 183 | BB0553 | 317 | 436 | BG0563 | 555 | 677 |
| BA0553 | 50 | 184 | BB0560 | 318 | 437 | BG0570 | 556 | 678 |
| BA0564 | 51 | 185 | BB0571 | 319 | 438 | BG0582 | 557 | 679 |
| BA0572 | 52 | 186 | BB0579 | 320 | 439 | BG0591 | 558 | 680 |
| BA0581 | 53 | 187 | BB0588 | 321 | 440 | BG0601 | 559 | 681 |
| BA0596 | 54 | 188 | BB0603 | 322 | 441 | BG0616 | 560 | 682 |
| BA0601 | 55 | 189 | BB0608 | 323 | 442 | BG0621 | 561 | 683 |
| BA0605 | 56 | 190 | BB0612 | 324 | 443 | BG0628 | 562 | 684 |
| BA0606 | 57 | 191 | BB0613 | 325 | 444 | BG0629 | 563 | 685 |
| BA0619 | 58 | 192 | BB0625 | 326 | 445 | BG0644 | 564 | 686 |
| BA0643 | 59 | 193 | BB0648 | 327 | 446 | BG0671 | 565 | 687 |
| BA0644 | 60 | 194 | BB0649 | 328 | 447 | BG0672 | 566 | 688 |
| BA0653 | 61 | 195 | BB0658 | 329 | 448 | BG0681 | 567 | 689 |
| BA0663 | 62 | 196 | BB0668 | 330 | 449 | BG0691 | 568 | 690 |
| BA0665 | 63 | 197 | BB0670 | 331 | 450 | BG0693 | 569 | 691 |
| BA0675 | 64 | 198 | BB0680 | 332 | 451 | BG0703 | 570 | 692 |
| BA0682 | 65 | 199 | BB0687 | 333 | 452 | BG0710 | 571 | 693 |
| BA0703 | 66 | 200 | BB0710 | 334 | 453 | BG0733 | 572 | 694 |
| BA0733 | 67 | 201 | BB0740 | 335 | 454 | BG0761 | 573 | 695 |
| BA0737 | 68 | 202 | BB0744 | 336 | 455 | BG0765 | 574 | 696 |
| BA0745 | 69 | 203 | BB0751 | 337 | 456 | BG0773 | 575 | 697 |
| BA0748 | 70 | 204 | BB0754 | 338 | 457 | BG0776 | 576 | 698 |
| BA0754 | 71 | 205 | BB0760 | 339 | 458 | BG0784 | 577 | 699 |
| BA0759 | 72 | 206 | BB0765 | 340 | 459 | BG0788 | 578 | 700 |
| BA0767 | 73 | 207 | BB0772 | 341 | 460 | BG0796 | 579 | 701 |
| BA0778 | 74 | 208 | BB0783 | 342 | 461 | BG0807 | 580 | 702 |
| BA0784 | 75 | 209 | BB0789 | 343 | 462 | BG0814 | 581 | 703 |
| BA0790 | 76 | 210 | BB0794 | 344 | 463 | BG0820 | 582 | 704 |
| BA0792 | 77 | 211 | BB0796 | 345 | 464 | BG0822 | 583 | 705 |
| BA0829 | 78 | 212 | BB0832 | 346 | 465 | BG0857 | 584 | 706 |
| BAP001 | 79 | 213 | BB0844 | 347 | 466 | BGP096 | 585 | 707 |
| BAP002 | 80 | 214 | BBA03 | 348 | 467 | BGA02 | 586 | 708 |
| BAP003 | 81 | 215 | BBA04 | 349 | 468 | BGA03 | 587 | 709 |
| BAP004 | 82 | 216 | BBA21 | 350 | 469 | BGA19 | 588 | 710 |
| BAP005 | 83 | 217 | BBA24 | 351 | 470 | BGA21 | 589 | 711 |
| BAP006 | 84 | 218 | BBA34 | 352 | 471 | BGA28 | 590 | 712 |
| BAP007 | 85 | 219 | BBA36 | 353 | 472 | BGA30 | 591 | 713 |
| BAP008 | 86 | 220 | BBA57 | 354 | 473 | BGA58 | 592 | 714 |
| BAP009 | 87 | 221 | BBA73 | 355 | 474 | BGA73 | 593 | 715 |
| BAP010 | 88 | 222 | BBB07 | 356 | 475 | BGB07 | 594 | 716 |
| BAP011 | 89 | 223 | BBB16 | 357 | 476 | BGB15 | 595 | 717 |
| BAP012 | 90 | 224 | BBB17 | 358 | 477 | BGB16 | 596 | 718 |
| BAP013 | 91 | 225 | BBB19 | 359 | 478 | BGB18 | 597 | 719 |
| BAP014 | 92 | 226 | BBC01 | 360 | 479 | BGP276 | 598 | 720 |
| BAP015 | 93 | 227 | BBG10 | 361 | 480 | BGP027 | 599 | 721 |
| BAP016 | 94 | 228 | BBG12 | 362 | 481 | BGP025 | 600 | 722 |
| BAP017 | 95 | 229 | BBG21 | 363 | 482 | BGP016 | 601 | 723 |
| BAP018 | 96 | 230 | BBG23 | 364 | 483 | BGP013 | 602 | 724 |
| BAP019 | 97 | 231 | BBG24 | 365 | 484 | BGP012 | 603 | 725 |
| BAP020 | 98 | 232 | BBG30 | 366 | 485 | BGP003 | 604 | 726 |
| BAP021 | 99 | 233 | BBH13 | 367 | 486 | BGP289 | 605 | 727 |
| BAP022 | 100 | 234 | BBE02 | 368 | 487 | BGP199 | 606 | 728 |
| BAP023 | 101 | 235 | BBI38 | 369 | 488 | BGA66 | 607 | 729 |
| BAP024 | 102 | 236 | BBK32 | 370 | 489 | BGP100 | 608 | 730 |
| BAP025 | 103 | 237 | BBM06 | 371 | 490 | BGP040 | 609 | 731 |
| BAP026 | 104 | 238 | BBQ34 | 372 | 491 | BGP132 | 610 | 732 |
| BAP027 | 105 | 239 | BBM03 | 373 | 492 | BGP043 | 611 | 733 |
| BAP028 | 106 | 240 | BBR15 | 374 | 493 | BGP069 | 612 | 734 |
| BAP029 | 107 | 241 | BBM38 | 375 | 494 | BGP049 | 613 | 735 |
| BAP030 | 108 | 242 | BBN34 | 376 | 495 | BGP235 | 614 | 736 |
| BAP031 | 109 | 243 | BBO39 | 377 | 496 | BGP260 | 615 | 737 |
| BAP032 | 110 | 244 | BBP28 | 378 | 497 | BGP082 | 616 | 738 |
| BAP033 | 111 | 245 | BBQ03 | 379 | 498 | BGP310 | 617 | 739 |
| BAP034 | 112 | 246 | BBQ32 | 380 | 499 | BGP190 | 618 | 740 |
| BAP035 | 113 | 247 | BBS29 | 381 | 500 | BGP001 | 619 | 741 |
| BAP036 | 114 | 248 | BBR35 | 382 | 501 | BGP302 | 620 | 742 |
| BAP037 | 115 | 249 | BBN33 | 383 | 502 | BGP313 | 621 | 743 |
| BAP038 | 116 | 250 | BBS36 | 384 | 503 | BGP301 | 622 | 744 |
| BAP039 | 117 | 251 | no match | | | BGA26 | 623 | 745 |
| BAP040 | 118 | 252 | BBG15 | 385 | 504 | BGP022 | 624 | 746 |
| BAP041 | 119 | 253 | no match | | | BGP036 | 625 | 747 |
| BAP042 | 120 | 254 | BBK53 | 386 | 505 | BGP085 | 626 | 748 |
| BAP043 | 121 | 255 | BBG19 | 387 | 506 | BGP267 | 627 | 749 |
| BAP044 | 122 | 256 | no match | | | BGP321 | 628 | 750 |
| BAP045/ | 123 | 257 | BBS42 | 123 | 257 | no match | | |
| BBS42 | | | | | | | | |
| CRFA006 | 124 | 258 | | | | | | |
| CRFA514 | 125 | 259 | | | | | | |
| CRFA554 | 126 | 260 | | | | | | |
| CRFA657 | 127 | 261 | | | | | | |
| CRFA744 | 128 | 262 | | | | | | |
| CRFA762 | 129 | 263 | | | | | | |
| CRFA780 | 130 | 264 | | | | | | |
| CRFBD21 | 131 | 265 | | | | | | |
| CRFBI14 | 132 | 266 | | | | | | |
| CRFBO17 | 133 | 267 | | | | | | |
| CRFP316 | 134 | 268 | | | | | | |

### Table 3: List of Strains Used for Gene Distribution Analysis.

[0293] Table 3 shows the representation of different strains of B. burgdorferi s.l. isolates analysed for the gene distribution study. The genospecies, OspA and ospC types (Wilske et al., 1988; Livey et al., 1995) and the source of isolation are given (CSF; cerebrospinal fluid). In addition, the type of disease associated with the corresponding ospC type is given, H; non invasive disease, H Inv; invasive disease, —; not associated with disease in humans.

TABLE 3

| No. | Strain | Genospecies | OspA | ospC | Isolation | Disease |
|---|---|---|---|---|---|---|
| 1 | M76 | B. garinii | 6 | 020 | CSF | H Inv |
| 2 | W | B. garinii | 5 | 013 | CSF | H Inv |
| 3 | P | B. afzelii | 2 | 008 | Skin | H Inv |
| 4 | K6 | B. garinii | 6 | 019 | Skin | H Inv |
| 5 | K67 | B. burgdorferi | 1 | 047 | Skin | H |
| | | s.s. | | | | |
| 6 | N40 | B. burgdorferi | 1 | 026 | I. scapularis | — |
| | | s.s. | | | | |
| 7 | Sh-2-82 | B. burgdorferi | 1 | 030 | I. scapularis | H Inv |
| | | s.s. | | | | |
| 8 | K86 | B. burgdorferi | 1 | 028 | Skin | H |
| | | s.s. | | | | |
| 9 | LAS | B. burgdorferi | 1 | 002 | Skin | H Inv |
| | | s.s. | | | | |
| 10 | HB19 | B. burgdorferi | 1 | 004 | Blood | H Inv |
| | | s.s. | | | | |
| 11 | Lenz | B. burgdorferi | 1 | 002 | Myocardium | H Inv |
| | | s.s. | | | | |
| 12 | 10/2002 | B. afzelii | 2 | 037 | Skin | H |
| 13 | BITS-B | B. garinii | 6 | 017 | I. ricinus | H Inv |
| 14 | 57 | B. garinii | 5 | 013 | CSF | H Inv |
| 15 | 60 | B. garinii | 6 | 012 | CSF | H Inv |
| 16 | 130/91 | B. afzelii | 2 | 010 | Skin | H |
| 17 | H13 | B. garinii | 6 | 025 | Heart | H Inv |
| 18 | K78 | B. afzelii | 2 | 007 | Skin | H |
| 19 | VS461 | B. afzelii | 2 | 022 | I. ricinus | H Inv |
| 20 | B31 | B. burgdorferi | 1 | 002 | I. scapularis | H Inv |
| | | s.s. | | | | |
| 21 | PKo | B. afzelii | 2 | 009 | Skin | H Inv |
| 22 | Z10 | B. garinii | 2 | 034 | I. ricinus | H Inv |
| 23 | Bol10 | B. garinii | 3 | 023 | CSF | H Inv |
| 24 | ZS7 | B. burgdorferi | 1 | 001 | I. ricinus | H Inv |
| | | s.s. | | | | |
| 25 | NBS16 | B. garinii | 3 | 033 | I. ricinus | H |
| 26 | KL11 | B. garinii | 6 | 019 | I. ricinus | H Inv |
| 27 | H9 | B. afzelii | 2 | 005 | Skin | H |
| 28 | 123/91 | B. afzelii | 2 | 011 | Skin | H |
| 29 | Simon | B. afzelii | 2 | 011 | Skin | H |
| 30 | ACA1 | B. afzelii | 2 | 008 | Skin | H Inv |

Table 4: Gene Distribution Analysis for a Selected Number of Antigens in Various Strains of the B. burgdorferi s.l. Strains.

[0294] Thirty B. burgdorferi s.l. strains as shown in Table 3 were tested by PCR with oligonucleotides specific for the genes encoding relevant antigens. The gene distribution table lists the number of positive PCR results from either the first 20 strains or all 30 strains and is an indication of the presence and conservation of the gene in diverse isolates of B. burgdorferi s.l. genospecies.

TABLE 4

| | Seq ID | Gene |
|---|---|---|
| Ba ORF | (DNA) | distribution |
| BA0056 | 1 | 26/30 |
| BA0060 | 2 | 30/30 |
| BA0062 | 3 | 19/20 |
| BA0072 | 4 | 20/20 |
| BA0075 | 5 | 6/20 |
| BA0078 | 6 | 30/30 |
| BA0087 | 7 | 30/30 |
| BA0091 | 8 | 30/30 |
| BA0106 | 9 | 30/30 |
| BA0126 | 10 | 20/20 |
| BA0135 | 11 | 30/30 |
| BA0149 | 12 | 20/20 |
| BA0150 | 13 | 20/20 |
| BA0152 | 14 | 20/20 |
| BA0181 | 15 | 20/20 |
| BA0192 | 16 | 24/30 |
| BA0200 | 17 | 27/30 |
| BA0210 | 18 | 28/30 |
| BA0215 | 19 | 29/30 |
| BA0221 | 20 | 20/20 |
| BA0235 | 21 | 30/30 |
| BA0237 | 22 | 10/20 |
| BA0283 | 23 | 20/20 |
| BA0295 | 24 | 20/20 |
| BA0314 | 25 | 8/20 |
| BA0321 | 26 | 30/30 |
| BA0327 | 27 | 13/20 |
| BA0329 | 28 | 30/30 |
| BA0343 | 29 | 19/20 |
| BA0345 | 30 | 19/30 |
| BA0351 | 31 | 12/20 |
| BA0356 | 32 | 28/30 |
| BA0364 | 33 | 30/30 |
| BA0380 | 34 | 29/30 |
| BA0388 | 35 | 17/20 |
| BA0389 | 36 | 20/20 |
| BA0417 | 37 | 30/30 |
| BA0419 | 38 | 0/20 |
| BA0429 | 39 | 9/20 |
| BA0431 | 40 | 20/20 |
| BA0442 | 41 | 30/30 |
| BA0464 | 42 | 30/30 |
| BA0469 | 43 | 28/30 |
| BA0475 | 44 | 16/20 |
| BA0507 | 45 | 30/30 |
| BA0513 | 46 | 16/20 |
| BA0514 | 47 | 4/20 |
| BA0539 | 48 | 20/20 |
| BA0546 | 49 | 11/20 |
| BA0553 | 50 | 19/20 |
| BA0564 | 51 | 30/30 |
| BA0572 | 52 | 20/20 |
| BA0581 | 53 | 30/30 |
| BA0596 | 54 | 30/30 |
| BA0601 | 55 | 16/20 |
| BA0605 | 56 | 28/30 |
| BA0606 | 57 | 13/20 |
| BA0619 | 58 | 13/20 |
| BA0643 | 59 | 30/30 |
| BA0644 | 60 | 19/20 |
| BA0653 | 61 | 30/30 |
| BA0663 | 62 | 20/20 |
| BA0665 | 63 | 30/30 |
| BA0675 | 64 | 30/30 |
| BA0682 | 65 | 30/30 |
| BA0703 | 66 | 19/20 |
| BA0733 | 67 | 29/30 |
| BA0737 | 68 | 26/30 |
| BA0745 | 69 | 30/30 |
| BA0748 | 70 | 30/30 |
| BA0754 | 71 | 30/30 |
| BA0759 | 72 | 30/30 |
| BA0767 | 73 | 19/20 |
| BA0778 | 74 | 1/20 |
| BA0784 | 75 | 30/30 |
| BA0790 | 76 | 26/30 |
| BA0792 | 77 | 30/30 |
| BA0829 | 78 | 28/30 |
| BAP001 | 79 | 5/20 |
| BAP002 | 80 | 8/20 |
| BAP003 | 81 | 22/30 |
| BAP004 | 82 | 30/30 |
| BAP005 | 83 | 0/20 |
| BAP006 | 84 | 29/30 |
| BAP007 | 85 | 30/30 |
| BAP008 | 86 | 8/20 |
| BAP009 | 87 | 11/20 |
| BAP011 | 89 | 4/20 |
| BAP012 | 90 | 20/20 |
| BAP013 | 91 | 30/30 |
| BAP014 | 92 | 12/30 |
| BAP015 | 93 | 11/20 |
| BAP016 | 94 | 13/20 |
| BAP017 | 95 | 12/20 |
| BAP018 | 96 | 2/20 |
| BAP019 | 97 | 11/20 |
| BAP020 | 98 | 0/30 |
| BAP021 | 99 | 22/30 |
| BAP022 | 100 | 26/30 |
| BAP023 | 101 | 26/30 |
| BAP024 | 102 | 18/30 |
| BAP025 | 103 | 30/30 |
| BAP026 | 104 | 8/20 |
| BAP027 | 105 | 26/30 |
| BAP028 | 106 | 8/20 |
| BAP029 | 107 | 6/30 |
| BAP030 | 108 | 11/20 |
| BAP031 | 109 | 8/20 |
| BAP032 | 110 | 0/20 |
| BAP033 | 111 | 12/20 |
| BAP034 | 112 | 10/20 |
| BAP035 | 113 | 9/20 |
| BAP036 | 114 | 10/20 |
| BAP037/ | 115 | 4/20 |
| BAP038 | 116 | |
| BAP039 | 117 | 0/20 |
| BAP040 | 118 | 0/20 |
| BAP041 | 119 | 0/20 |
| BAP042 | 120 | 3/20 |
| BAP043 | 121 | 28/30 |
| BAP044 | 122 | 1/20 |
| BAP045/ | 123 | 9/20 |
| BBS42 | | |

### Table 5: Immunogenicity of Epitopes in Mice.

[0295] B. burgdorferi s.l. antigens were tested for immunogenicity by immunization with E. coli clones harbouring plasmids encoding the platform proteins FhuA or LamB fused to B. burgdorferi s.l. peptides. The presence of epitope-specific antibodies was detected and measured by peptide ELISA. Results are expressed as − to ++++, and calculated as the sum of the reactivities of individual mouse sera based on OD405 nm (−; 0-0.1, +0.1-0.2, ++; 0.2-0.4, +++; 0.4-0.8, ++++, >0.8).

TABLE 5

| | Seq ID | Seq ID | injection | | Peptide | |
|---|---|---|---|---|---|---|
| ORF | (DNA) | (Protein) | name | peptide name | ELISA | aa (start-stop) |
| BA0056 | 1 | 135 | Baf28 | BAObb0058.03 | ++ | 257-278 |
| BA0062 | 3 | 137 | Baf89 | BAObb0064.01 | +++ | 159-188 |
| | | | | BAObb0064.02 | ++ | 184-213 |
| BA0072 | 4 | 138 | Baf70 | BAObb0074.01 | ++ | 230-251 |
| | | | | BAObb0074.02 | ++++ | 247-267 |
| BA0075 | 5 | 139 | Baf104 | BAOba0077.01 | +++ | 138-164 |
| | | | | BAOba0077.02 | ++ | 160-187 |
| BA0078 | 6 | 140 | Baf77 | BAObb0081.01 | + | 97-120 |
| | | | | BAObb0081.02 | ++ | 116-139 |
| | | | | BAObb0081.03 | ++ | 135-158 |
| | | | | BAObb0081.04 | ++ | 154-177 |
| BA0087 | 7 | 141 | Baf127 | BAOba0089.01 | +++ | 160-187 |
| BA0106 | 9 | 143 | Baf83 | BAObb0109.01 | + | 165-192 |
| | | | | BAObb0109.02 | ++++ | 188-214 |
| BA0126 | 10 | 144 | Baf113 | BAOba0128.01 | + | 350-378 |
| BA0135 | 11 | 145 | Baf22 | BAOpbp-1.02 | +++ | 62-86 |
| | | | | BAOpbp-1.03 | + | 82-106 |
| BA0149 | 12 | 146 | Baf11 | BAOflaB.01 | +++ | 18-42 |
| | | | | BAOflaB.02 | +++ | 38-62 |
| | | | | BAOflaB.04 | + | 78-102 |
| | | | | BAOflaB.05 | +++ | 98-122 |
| | | | | BAOflaB.06 | + | 118-142 |
| | | | | BAOflaB.07 | ++++ | 138-165 |
| | | | Baf12 | BAOflaB.09 | +++ | 275-297 |
| | | | | BAOflaB.10 | +++ | 293-315 |
| | | | | BAOflaB.12 | + | 185-211 |
| | | | | BAOflaB.13 | +++ | 207-233 |
| | | | | BAOflaB.14 | ++ | 229-255 |
| BA0150 | 13 | 147 | Baf23 | BAOfliD.01 | + | 22-50 |
| | | | | BAOfliD.02 | + | 46-75 |
| | | | | BAOfliD.03 | ++ | 110-131 |
| | | | | BAOfliD.04 | ++ | 127-148 |
| | | | Baf24 | BAOfliD.07 | + | 344-367 |
| | | | | BAOfliD.08 | +++ | 361-384 |
| | | | | BAOfliD.09 | +++ | 382-405 |
| | | | | BAOfliD.10 | ++ | 401-424 |
| BA0152 | 14 | 148 | Baf114 | BAOba0155.03 | ++ | 304-328 |
| BA0181 | 15 | 149 | Baf35 | BAObb0181.01 | + | 6-29 |
| | | | | BAObb0181.04 | +++ | 68-92 |
| | | | | BAObb0181.05 | ++++ | 88-112 |
| | | | Baf36 | BAObb0181.10 | +++ | 449-471 |
| | | | | BAObb0181.12 | ++ | 485-507 |
| BA0210 | 18 | 152 | Baf1 | BAOlmp1.01 | +++ | 937-962 |
| | | | | BAOlmp1.02 | ++ | 958-983 |
| | | | Baf2 | BAOlmp1.03 | +++ | 102-130 |
| | | | | BAOlmp1.04 | +++ | 126-154 |
| BA0215 | 19 | 153 | Baf71 | BAObb0215.01 | ++ | 80-103 |
| | | | | BAObb0215.02 | ++ | 99-122 |
| | | | | BAObb0215.03 | ++ | 118-141 |
| | | | | BAObb0215.04 | ++ | 137-159 |
| BA0221 | 20 | 154 | Baf26 | BAOfliG-1.04 | +++ | 270-299 |
| BA0235 | 21 | 155 | Baf105 | BAOba0242.01 | + | 126-153 |
| | | | | BAOba0242.03 | ++ | 172-200 |
| BA0237 | 22 | 156 | Baf15 | BAObb0238.01 | + | 15-40 |
| | | | | BAObb0238.02 | +++ | 36-61 |
| | | | | BAObb0238.03 | + | 57-82 |
| | | | | BAObb0238.04 | +++ | 78-103 |
| | | | | BAObb0238.05 | ++++ | 99-124 |
| BA0283 | 23 | 157 | Baf37 | BAObb0283.01 | + | 35-63 |
| | | | | BAObb0283.03 | +++ | 82-109 |
| BA0321 | 26 | 160 | Baf58 | BAObb0323.06 | +++ | 298-327 |
| BA0327 | 27 | 161 | Baf18 | BAOoppA-2.01 | +++ | 20-43 |
| | | | | BAOoppA-2.02 | + | 39-62 |
| | | | | BAOoppA-2.03 | +++ | 58-79 |
| | | | Baf19 | BAOoppA-2.12 | ++ | 354-377 |
| | | | Baf20 | BAOoppA-2.13 | + | 404-431 |
| | | | | BAOoppA-2.14 | ++ | 427-453 |
| | | | | BAOoppA-2.15 | ++ | 449-475 |
| | | | | BAOoppA-2.16 | +++ | 471-498 |
| | | | | BAOoppA-2.17 | + | 494-521 |
| BA0329 | 28 | 162 | Baf34 | BAOoppA-3.01 | ++ | 40-62 |
| | | | | BAOoppA-3.02 | + | 58-80 |
| | | | | BAOoppA-3.03 | + | 76-97 |
| | | | | BAOoppA-3.04 | ++++ | 251-276 |
| | | | | BAOoppA-3.05 | ++++ | 272-297 |
| | | | | BAOoppA-3.06 | +++ | 291-316 |
| | | | | BAOoppA-3.08 | + | 333-358 |
| BA0351 | 31 | 165 | Baf38 | BAObb0353.01 | ++ | 197-222 |
| | | | | BAObb0353.03 | ++ | 239-264 |
| | | | | BAObb0353.04 | + | 260-284 |
| BA0356 | 32 | 166 | Baf55 | BAObb0359.01 | ++++ | 378-402 |
| | | | | BAObb0359.04 | + | 438-461 |
| BA0364 | 33 | 167 | Baf93 | BAOba0378.01 | ++++ | 82-107 |
| | | | | BAOba0378.02 | ++++ | 103-127 |
| | | | | BAOba0378.03 | + | 212-235 |
| | | | | BAOba0378.04 | + | 231-253 |
| BA0388 | 35 | 169 | Baf107 | BAOba0402.01 | ++++ | 1053-1082 |
| BA0389 | 36 | 170 | Baf118 | BAOba0403.05 | +++ | 270-292 |
| BA0417 | 37 | 171 | Baf78 | BAObb0418.01 | ++ | 44-65 |
| | | | | BAObb0418.02 | + | 61-82 |
| | | | | BAObb0418.03 | + | 78-99 |
| BA0419 | 38 | 172 | Baf59 | BAObb0420.01 | ++ | 1230-1254 |
| BA0429 | 39 | 173 | Baf97 | BAOba0444.01 | + | 110-131 |
| BA0431 | 40 | 174 | Baf84 | BAObb0436.01 | ++++ | 372-395 |
| | | | | BAObb0436.03 | +++ | 410-434 |
| BA0442 | 41 | 175 | Baf85 | BAObb0446.01 | + | 439-464 |
| BA0464 | 42 | 176 | Baf98 | BAOba0480.03 | + | 52-77 |
| BA0469 | 43 | 177 | Baf108 | BAOba0485.01 | ++++ | 281-300 |
| | | | | BAOba0485.02 | +++ | 296-316 |
| BA0475 | 44 | 178 | Baf99 | BAOba0491.01 | ++ | 33-57 |
| | | | | BAOba0491.02 | ++ | 53-78 |
| BA0507 | 45 | 179 | Baf39 | BAObb0512.01 | ++ | 718-744 |
| | | | | BAObb0512.02 | ++ | 740-766 |
| | | | | BAObb0512.03 | + | 762-788 |
| BA0513 | 46 | 180 | Baf64 | BAObb0518.01 | + | 66-93 |
| | | | | BAObb0518.02 | + | 89-116 |
| | | | | BAObb0518.03 | ++++ | 112-139 |
| | | | | BAObb0518.04 | ++ | 135-161 |
| BA0539 | 48 | 182 | Baf119 | BAOba0557.01 | ++ | 171-197 |
| BA0553 | 50 | 184 | Baf90 | BAOba0573.01 | ++ | 102-127 |
| | | | | BAOba0573.02 | + | 123-148 |
| | | | | BAOba0573.03 | ++++ | 144-170 |
| BA0581 | 53 | 187 | Baf86 | BAObb0588.01 | + | 91-114 |
| | | | | BAObb0588.02 | + | 110-133 |
| BA0596 | 54 | 188 | Baf40 | BAOp66.01 | ++ | 36-60 |
| | | | | BAOp66.02 | ++ | 56-80 |
| | | | | BAOp66.03 | + | 76-100 |
| | | | | BAOp66.04 | + | 96-119 |
| | | | Baf41 | BAOp66.05 | ++++ | 343-371 |
| | | | | BAOp66.06 | +++ | 367-394 |
| BA0605 | 56 | 190 | Baf42 | BAObb0612.01 | ++ | 156-183 |
| | | | | BAObb0612.02 | + | 179-206 |
| | | | | BAObb0612.03 | + | 202-229 |
| | | | | BAObb0612.04 | ++ | 225-252 |
| | | | | BAObb0612.05 | ++ | 248-274 |
| BA0619 | 58 | 192 | Baf30 | BAOamds.02 | ++ | 98-125 |
| | | | | BAOamds.03 | + | 121-148 |
| | | | | BAOamds.04 | + | 144-170 |
| | | | | BAOamds.05 | + | 165-187 |
| | | | | BAOamds.07 | + | 201-223 |
| | | | Baf31 | BAOamds.08 | +++ | 285-309 |
| BA0643 | 59 | 193 | Baf129 | BAOba0670.01 | + | 390-409 |
| BA0644 | 60 | 194 | Baf72 | BAObb0649.01 | + | 6-33 |
| | | | | BAObb0649.02 | ++ | 29-55 |
| | | | | BAObb0649.03 | + | 52-79 |
| | | | | BAObb0649.04 | + | 74-100 |
| BA0653 | 61 | 195 | Baf43 | BAObb0658.02 | ++ | 172-200 |
| | | | | BAObb0658.03 | ++ | 196-223 |
| BA0663 | 62 | 196 | Baf44 | BAOflaA.01 | +++ | 12-39 |
| | | | | BAOflaA.02 | +++ | 35-62 |
| | | | | BAOflaA.03 | ++++ | 58-84 |
| | | | | BAOflaA.04 | + | 156-179 |
| | | | | BAOflaA.05 | +++ | 175-197 |
| BA0675 | 64 | 198 | Baf45 | BAObb0680.01 | + | 28-53 |
| | | | | BAObb0680.02 | + | 49-73 |
| | | | | BAObb0680.03 | ++ | 165-188 |
| | | | | BAObb0680.04 | + | 184-207 |
| | | | | BAObb0680.05 | ++ | 203-226 |
| | | | | BAObb0680.06 | +++ | 292-320 |
| | | | | BAObb0680.07 | + | 316-344 |
| | | | | BAObb0680.08 | ++ | 531-560 |
| | | | | BAObb0680.09 | + | 556-584 |
| | | | | BAObb0680.10 | + | 580-608 |
| BA0703 | 66 | 200 | Baf101 | BAObb0710.02 | ++ | 200-228 |
| BA0737 | 68 | 202 | Baf16 | BAOp83.06 | +++ | 348-374 |
| BA0745 | 69 | 203 | Baf110 | BAOba0779.01 | +++ | 116-143 |
| | | | | BAOba0779.02 | ++++ | 139-166 |
| BA0748 | 70 | 204 | Baf87 | BAObb0754.01 | ++ | 203-227 |
| BA0759 | 72 | 206 | Baf46 | BAObb0765.01 | + | 183-208 |
| | | | | BAObb0765.02 | ++ | 204-229 |
| | | | | BAObb0765.03 | ++++ | 225-250 |
| BA0778 | 74 | 208 | Baf47 | BAObb0783.03 | ++++ | 359-384 |
| BA0784 | 75 | 209 | Baf96 | BAOba0819.01 | + | 353-378 |
| | | | | BAOba0819.02 | ++++ | 374-399 |
| | | | | BAOba0819.03 | +++ | 395-419 |
| BA0790 | 76 | 210 | Baf48 | BAObb0794.03 | + | 1372-1398 |
| | | | | BAObb0794.04 | ++ | 1394-1419 |
| BA0792 | 77 | 211 | Baf49 | BAObb0796.01 | +++ | 14-38 |
| | | | | BAObb0796.02 | +++ | 34-58 |
| | | | | BAObb0796.03 | + | 54-78 |
| BA0829 | 78 | 212 | Baf111 | BAObb0832.02 | + | 95-122 |
| | | | | BAObb0832.03 | + | 118-146 |
| BAP001 | 79 | 213 | Baf69 | BAObgp096.01 | + | 20-44 |
| | | | | BAObgp096.02 | + | 40-64 |
| | | | | BAObgp096.03 | + | 60-84 |
| | | | | BAObgp096.04 | +++ | 80-104 |
| | | | | BAObgp096.05 | + | 138-162 |
| | | | | BAObgp096.06 | + | 158-182 |
| | | | | BAObgp096.07 | + | 178-201 |
| BAP002 | 80 | 214 | Baf65 | BAObba03.01 | +++ | 41-67 |
| | | | | BAObba03.02 | +++ | 63-89 |
| | | | | BAObba03.03 | ++++ | 85-111 |
| | | | | BAObba03.04 | ++++ | 107-133 |
| BAP003 | 81 | 215 | Baf80 | BAObba04.01 | +++ | 165-185 |
| | | | | BAObba04.02 | + | 181-200 |
| BAP005 | 83 | 217 | Baf66 | BAObba24.01 | +++ | 15-44 |
| | | | | BAObba24.02 | +++ | 40-68 |
| | | | | BAObba24.03 | + | 64-92 |
| BAP006 | 84 | 218 | Baf25 | BAOoppA-4.01 | + | 335-360 |
| | | | | BAOoppA-4.02 | + | 356-381 |
| | | | | BAOoppA-4.03 | + | 422-446 |
| | | | | BAOoppA-4.04 | + | 442-465 |
| BAP007 | 85 | 219 | Baf67 | BAObba36.01 | + | 50-74 |
| | | | | BAObba36.02 | + | 70-94 |
| | | | | BAObba36.03 | + | 90-114 |
| | | | | BAObba36.04 | + | 110-133 |
| | | | | BAObba36.06 | + | 164-192 |
| | | | | BAObba36.07 | + | 188-215 |
| BAP008 | 86 | 220 | Baf91 | BAObba57.01 | ++++ | 91-116 |
| | | | | BAObba57.02 | ++++ | 112-137 |
| | | | | BAObba57.03 | + | 133-158 |
| | | | | BAObba57.04 | ++++ | 154-179 |
| BAP012 | 90 | 224 | Baf122 | BAObbb17.01 | +++ | 331-352 |
| BAP013 | 91 | 225 | Baf94 | BAObbb19.01 | + | 116-143 |
| | | | | BAObbb19.02 | ++++ | 139-166 |
| | | | | BAObbb19.03 | ++++ | 162-189 |
| | | | | BAObbb19.04 | ++++ | 185-212 |
| BAP015 | 93 | 227 | Baf6 | BAObgp027.19 | +++ | 3-27 |
| | | | Baf7 | BAObgp027.08 | +++ | 616-640 |
| | | | | BAObgp027.09 | + | 636-659 |
| | | | | BAObgp027.10 | + | 655-678 |
| | | | | BAObgp027.12 | ++ | 576-598 |
| | | | | BAObgp027.13 | + | 594-615 |
| | | | | BAObgp027.14 | +++ | 611-632 |
| | | | Baf8 | BAObgp027.01 | + | 693-718 |
| | | | | BAObgp027.02 | + | 714-739 |
| BAP016 | 94 | 228 | Baf123 | BAObbg12.01 | ++++ | 32-45 |
| BAP017 | 95 | 229 | Baf3 | BAObbg21.01 | ++++ | 112-135 |
| | | | | BAObbg21.02 | +++ | 131-153 |
| | | | | BAObbg21.04 | + | 324-349 |
| | | | | BAObbg21.05 | + | 345-370 |
| | | | | BAObbg21.06 | + | 366-391 |
| BAP018 | 96 | 230 | Baf63 | BAObbg23.02 | + | 122-143 |
| | | | | BAObbg23.04 | + | 170-195 |
| BAP019 | 97 | 231 | Baf4 | BAObbg24.04 | +++ | 377-400 |
| | | | | BAObbg24.05 | +++ | 396-419 |
| | | | Baf5 | BAObbg24.02 | ++++ | 91-115 |
| | | | | BAObbg24.03 | ++++ | 111-135 |
| BAP021 | 99 | 233 | Baf73 | BAObbg33.01 | +++ | 3-27 |
| | | | | BAObbg33.02 | ++ | 23-47 |
| | | | | BAObbg33.03 | + | 43-68 |
| | | | Baf143 | BAObbh13.01 | +++ | 4-30 |
| | | | | BAObbh13.02 | +++ | 26-52 |
| BAP022 | 100 | 234 | Baf50 | BAObbh09.04 | ++++ | 400-429 |
| | | | | BAObbh09.05 | + | 521-545 |
| BAP023 | 101 | 235 | Baf81 | BAObbj41.01 | +++ | 61-84 |
| | | | | BAObbj41.02 | + | 80-103 |
| | | | | BAObbj41.03 | ++++ | 99-122 |
| BAP024 | 102 | 236 | Baf13 | BAOp35.01 | + | 8-31 |
| | | | | BAOp35.07 | ++ | 124-149 |
| | | | Baf14 | BAOp35.09 | ++ | 166-191 |
| | | | | BAOp35.11 | + | 207-232 |
| | | | | BAOp35.12 | ++ | 265-294 |
| | | | | BAOp35.13 | +++ | 290-318 |
| BAP025 | 103 | 237 | Baf51 | BAObbl06.01 | ++++ | 20-43 |
| | | | | BAObbl06.02 | ++ | 39-62 |
| | | | | BAObbl06.03 | + | 95-122 |
| | | | | BAObbl06.04 | +++ | 117-143 |
| | | | Baf75 | BAObbq13.01 | ++ | 133-159 |
| | | | | BAObbq13.02 | +++ | 155-181 |
| BAP026 | 104 | 238 | Baf88 | BAObbr27.01 | +++ | 1-29 |
| BAP027 | 105 | 239 | Baf103 | BAObgp043.01 | + | 121-143 |
| | | | | BAObgp043.02 | + | 139-160 |
| | | | | BAObgp043.03 | +++ | 156-178 |
| BAP028 | 106 | 240 | Baf57 | BAObbn15.01 | ++++ | 195-219 |
| BAP030 | 108 | 242 | Baf52 | BAObbo34.01 | +++ | 4-32 |
| | | | | BAObbo34.02 | + | 27-54 |
| | | | | BAObbo34.03 | ++++ | 50-77 |
| BAP031 | 109 | 243 | Baf92 | BAObbs41.01 | +++ | 160-186 |
| | | | | BAObbs41.02 | + | 182-208 |
| | | | Baf54 | BAObbr42.01 | +++ | 122-149 |
| BAP032 | 110 | 244 | Baf74 | BAObbp28.01 | ++++ | 48-73 |
| | | | | BAObbp28.02 | +++ | 69-94 |
| BAP033 | 111 | 245 | Baf32 | BAOomp.04 | +++ | 151-173 |
| BAP034 | 112 | 246 | Baf53 | BAObbq32.01 | +++ | 14-41 |
| | | | | BAObbq32.02 | +++ | 37-63 |
| BAP035 | 113 | 247 | Baf125 | BAObgp001.01 | +++ | 7-30 |
| | | | | BAObgp001.02 | +++ | 26-49 |
| | | | | BAObgp001.03 | ++ | 45-69 |
| BAP036 | 114 | 248 | Baf112 | BAObbr35.01 | ++ | 1-21 |
| | | | | BAObbr35.02 | ++ | 17-44 |
| BAP038 | 116 | 250 | Baf10 | BAObbs36.03 | + | 43-66 |
| BAP039 | 117 | 251 | Baf124 | BAObga26.02 | ++++ | 47-71 |
| | | | | BAObga26.03 | ++++ | 67-91 |
| BAP040 | 118 | 252 | Baf126 | BAObgp022.02 | +++ | 39-60 |
| | | | | BAObgp022.03 | ++++ | 56-78 |
| BAP041 | 119 | 253 | Baf142 | BAObgp036.03 | +++ | 199-224 |
| BAP042 | 120 | 254 | Baf76 | BAObgp085.01 | +++ | 70-94 |
| | | | | BAObgp085.02 | ++++ | 90-113 |
| BAP043 | 121 | 255 | Baf68 | BAObbq34.03 | ++ | 48-70 |
| BAP044 | 122 | 256 | Baf95 | BAObgp321.01 | + | 1-25 |
| | | | | BAObgp321.02 | + | 21-45 |
| | | | | BAObgp321.03 | ++ | 41-65 |
| BAP045 | 123 | 257 | Baf102 | BAObbs42.01 | ++ | 27-51 |

Table 6: Peptide ELISA with Peptides Derived from B. burgdorferi s.l.

[0296] The “Sum” represents the number of sera, for which the OD405 nm measurement was at least 0.05 OD units above the blank without coating. “From aa” and “To aa” denotes the position of the peptide relative to the full length protein as listed under the respective sequence identification number (Seq ID). ELISA experiments were preformed with peptides derived from B. burgdorferi s.l. and 22 human sera (P1755, P1766, P1772, P1806, P1811, P3055, P3144, P3186, P3219, P3017, P3084, P3288, P3150, P3301, P3344, P3394, P3183, P3336, P1789, P1796, P1938, P1941).

TABLE 6

| | | | | From | |
|---|---|---|---|---|---|
| Peptide | Ba ORF | Seq ID | Sum | aa | To aa |
| BAOamds.02 | BA0619 | 192 | 2 | 98 | 125 |
| BAOamds.04 | BA0619 | 192 | 7 | 144 | 170 |
| BAOamds.05 | BA0619 | 192 | 4 | 165 | 187 |
| BAOamds.07 | BA0619 | 192 | 14 | 201 | 223 |
| BAOamds.08 | BA0619 | 192 | 15 | 285 | 309 |
| BAOamds.09 | BA0619 | 192 | 9 | 305 | 329 |
| BAOamds.10 | BA0619 | 192 | 7 | 325 | 348 |
| BAOamds.11 | BA0619 | 192 | 19 | 400 | 425 |
| BAOamds.12 | BA0619 | 192 | 8 | 513 | 541 |
| BAOamds.13 | BA0619 | 192 | 2 | 537 | 564 |
| BAOamds.14 | BA0619 | 192 | 2 | 560 | 587 |
| BAOamds.15 | BA0619 | 192 | 3 | 583 | 610 |
| BAOba0077.01 | BA0075 | 139 | 20 | 138 | 164 |
| BAOba0077.02 | BA0075 | 139 | 14 | 160 | 187 |
| BAOba0089.01 | BA0087 | 141 | 12 | 160 | 187 |
| BAOba0128.01 | BA0126 | 144 | 15 | 350 | 378 |
| BAOba0128.02 | BA0126 | 144 | 18 | 374 | 402 |
| BAOba0128.03 | BA0126 | 144 | 9 | 398 | 426 |
| BAOba0128.04 | BA0126 | 144 | 17 | 422 | 451 |
| BAOba0155.01 | BA0152 | 148 | 3 | 264 | 288 |
| BAOba0155.02 | BA0152 | 148 | 11 | 284 | 308 |
| BAOba0155.03 | BA0152 | 148 | 10 | 304 | 328 |
| BAOba0198.01 | BA0192 | 150 | 8 | 77 | 91 |
| BAOba0207.01 | BA0200 | 151 | 10 | 111 | 134 |
| BAOba0242.01 | BA0235 | 155 | 6 | 126 | 153 |
| BAOba0242.02 | BA0235 | 155 | 11 | 149 | 176 |
| BAOba0242.03 | BA0235 | 155 | 17 | 172 | 200 |
| BAOba0303.01 | BA0295 | 158 | 12 | 220 | 245 |
| BAOba0303.02 | BA0295 | 158 | 10 | 241 | 266 |
| BAOba0303.03 | BA0295 | 158 | 4 | 262 | 288 |
| BAOba0323.01 | BA0314 | 159 | 1 | 31 | 53 |
| BAOba0323.02 | BA0314 | 159 | 13 | 49 | 71 |
| BAOba0323.03 | BA0314 | 159 | 20 | 67 | 89 |
| BAOba0356.01 | BA0343 | 163 | 13 | 258 | 280 |
| BAOba0356.02 | BA0343 | 163 | 10 | 276 | 298 |
| BAOba0356.03 | BA0343 | 163 | 12 | 294 | 317 |
| BAOba0356.04 | BA0343 | 163 | 11 | 313 | 336 |
| BAOba0358.01 | BA0345 | 164 | 13 | 458 | 472 |
| BAOba0378.01 | BA0364 | 167 | 8 | 82 | 107 |
| BAOba0378.02 | BA0364 | 167 | 14 | 103 | 127 |
| BAOba0378.02 | BA0364 | 167 | 7 | 103 | 127 |
| BAOba0378.03 | BA0364 | 167 | 13 | 212 | 235 |
| BAOba0378.03 | BA0364 | 167 | 2 | 212 | 235 |
| BAOba0378.04 | BA0364 | 167 | 18 | 231 | 253 |
| BAOba0378.04 | BA0364 | 167 | 4 | 231 | 253 |
| BAOba0394.01 | BA0380 | 168 | 12 | 26 | 51 |
| BAOba0394.02 | BA0380 | 168 | 10 | 47 | 73 |
| BAOba0402.01 | BA0388 | 169 | 6 | 1053 | 1082 |
| BAOba0403.01 | BA0389 | 170 | 5 | 194 | 217 |
| BAOba0403.02 | BA0389 | 170 | 17 | 213 | 236 |
| BAOba0403.03 | BA0389 | 170 | 15 | 232 | 255 |
| BAOba0403.04 | BA0389 | 170 | 5 | 251 | 274 |
| BAOba0403.05 | BA0389 | 170 | 15 | 270 | 292 |
| BAOba0444.01 | BA0429 | 173 | 10 | 110 | 131 |
| BAOba0444.02 | BA0429 | 173 | 4 | 179 | 201 |
| BAOba0444.03 | BA0429 | 173 | 11 | 197 | 219 |
| BAOba0444.04 | BA0429 | 173 | 2 | 215 | 236 |
| BAOba0480.01 | BA0464 | 176 | 5 | 12 | 36 |
| BAOba0480.02 | BA0464 | 176 | 3 | 32 | 56 |
| BAOba0480.03 | BA0464 | 176 | 11 | 52 | 77 |
| BAOba0485.01 | BA0469 | 177 | 12 | 281 | 300 |
| BAOba0485.02 | BA0469 | 177 | 16 | 296 | 316 |
| BAOba0491.01 | BA0475 | 178 | 12 | 33 | 57 |
| BAOba0491.02 | BA0475 | 178 | 4 | 53 | 78 |
| BAOba0557.01 | BA0539 | 182 | 9 | 171 | 197 |
| BAOba0557.02 | BA0539 | 182 | 7 | 193 | 219 |
| BAOba0557.03 | BA0539 | 182 | 6 | 215 | 240 |
| BAOba0565.01 | BA0546 | 183 | 13 | 363 | 388 |
| BAOba0565.02 | BA0546 | 183 | 20 | 384 | 409 |
| BAOba0565.03 | BA0546 | 183 | 4 | 405 | 430 |
| BAOba0573.01 | BA0553 | 184 | 5 | 102 | 127 |
| BAOba0573.02 | BA0553 | 184 | 5 | 123 | 148 |
| BAOba0573.03 | BA0553 | 184 | 7 | 144 | 170 |
| BAOba0584.01 | BA0564 | 185 | 13 | 149 | 163 |
| BAOba0623.01 | BA0601 | 189 | 1 | 342 | 366 |
| BAOba0623.02 | BA0601 | 189 | 14 | 362 | 386 |
| BAOba0670.01 | BA0643 | 193 | 17 | 390 | 409 |
| BAOba0692.01 | BA0665 | 197 | 9 | 50 | 64 |
| BAOba0710.01 | BA0682 | 199 | 5 | 223 | 249 |
| BAOba0710.02 | BA0682 | 199 | 13 | 245 | 272 |
| BAOba0765.01 | BA0733 | 201 | 9 | 117 | 131 |
| BAOba0779.01 | BA0745 | 203 | 15 | 116 | 143 |
| BAOba0779.02 | BA0745 | 203 | 3 | 139 | 166 |
| BAOba0789.01 | BA0754 | 205 | 3 | 1 | 21 |
| BAOba0802.01 | BA0767 | 207 | 10 | 245 | 270 |
| BAOba0802.02 | BA0767 | 207 | 11 | 266 | 291 |
| BAOba0802.03 | BA0767 | 207 | 6 | 287 | 312 |
| BAOba0802.04 | BA0767 | 207 | 3 | 308 | 332 |
| BAOba0819.01 | BA0784 | 209 | 2 | 353 | 378 |
| BAOba0819.02 | BA0784 | 209 | 16 | 374 | 399 |
| BAOba0819.03 | BA0784 | 209 | 8 | 395 | 419 |
| BAObb0832.02 | BA0829 | 212 | 7 | 95 | 122 |
| BAObb0832.03 | BA0829 | 212 | 14 | 118 | 146 |
| BAObb0058.01 | BA0056 | 135 | 17 | 128 | 151 |
| BAObb0058.02 | BA0056 | 135 | 6 | 146 | 169 |
| BAObb0058.06 | BA0056 | 135 | 2 | 314 | 336 |
| BAObb0058.07 | BA0056 | 135 | 12 | 339 | 361 |
| BAObb0058.08 | BA0056 | 135 | 15 | 357 | 379 |
| BAObb0064.01 | BA0062 | 137 | 6 | 159 | 188 |
| BAObb0064.02 | BA0062 | 137 | 6 | 184 | 213 |
| BAObb0074.01 | BA0072 | 138 | 9 | 230 | 251 |
| BAObb0074.02 | BA0072 | 138 | 2 | 247 | 267 |
| BAObb0081.01 | BA0078 | 140 | 1 | 97 | 120 |
| BAObb0081.02 | BA0078 | 140 | 2 | 116 | 139 |
| BAObb0081.03 | BA0078 | 140 | 5 | 135 | 158 |
| BAObb0081.04 | BA0078 | 140 | 2 | 154 | 177 |
| BAObb0094.01 | BA0091 | 142 | 6 | 195 | 228 |
| BAObb0109.01 | BA0106 | 143 | 8 | 165 | 192 |
| BAObb0109.02 | BA0106 | 143 | 6 | 188 | 214 |
| BAObb0181.01 | BA0181 | 149 | 10 | 6 | 29 |
| BAObb0181.02 | BA0181 | 149 | 4 | 25 | 47 |
| BAObb0181.03 | BA0181 | 149 | 10 | 43 | 65 |
| BAObb0181.04 | BA0181 | 149 | 1 | 68 | 92 |
| BAObb0181.06 | BA0181 | 149 | 17 | 262 | 288 |
| BAObb0181.08 | BA0181 | 149 | 7 | 306 | 331 |
| BAObb0181.09 | BA0181 | 149 | 2 | 326 | 351 |
| BAObb0181.10 | BA0181 | 149 | 2 | 449 | 471 |
| BAObb0181.11 | BA0181 | 149 | 1 | 467 | 489 |
| BAObb0181.12 | BA0181 | 149 | 3 | 485 | 507 |
| BAObb0215.01 | BA0215 | 153 | 5 | 80 | 103 |
| BAObb0215.02 | BA0215 | 153 | 1 | 99 | 122 |
| BAObb0215.03 | BA0215 | 153 | 5 | 118 | 141 |
| BAObb0215.04 | BA0215 | 153 | 15 | 137 | 159 |
| BAObb0238.01 | BA0237 | 156 | 2 | 15 | 40 |
| BAObb0238.02 | BA0237 | 156 | 16 | 36 | 61 |
| BAObb0238.03 | BA0237 | 156 | 9 | 57 | 82 |
| BAObb0238.04 | BA0237 | 156 | 3 | 78 | 103 |
| BAObb0238.05 | BA0237 | 156 | 5 | 99 | 124 |
| BAObb0238.06 | BA0237 | 156 | 7 | 120 | 146 |
| BAObb0283.01 | BA0283 | 157 | 4 | 35 | 63 |
| BAObb0283.02 | BA0283 | 157 | 2 | 59 | 86 |
| BAObb0283.04 | BA0283 | 157 | 3 | 187 | 213 |
| BAObb0283.05 | BA0283 | 157 | 2 | 209 | 235 |
| BAObb0283.07 | BA0283 | 157 | 3 | 252 | 277 |
| BAObb0323.01 | BA0321 | 160 | 10 | 83 | 108 |
| BAObb0323.02 | BA0321 | 160 | 11 | 104 | 129 |
| BAObb0323.03 | BA0321 | 160 | 8 | 125 | 150 |
| BAObb0323.04 | BA0321 | 160 | 7 | 146 | 172 |
| BAObb0323.05 | BA0321 | 160 | 7 | 272 | 302 |
| BAObb0323.06 | BA0321 | 160 | 9 | 298 | 327 |
| BAObb0353.01 | BA0351 | 165 | 13 | 197 | 222 |
| BAObb0353.02 | BA0351 | 165 | 16 | 218 | 243 |
| BAObb0353.03 | BA0351 | 165 | 15 | 239 | 264 |
| BAObb0353.04 | BA0351 | 165 | 16 | 260 | 284 |
| BAObb0359.01 | BA0356 | 166 | 16 | 378 | 402 |
| BAObb0359.02 | BA0356 | 166 | 17 | 398 | 422 |
| BAObb0359.03 | BA0356 | 166 | 18 | 418 | 442 |
| BAObb0359.04 | BA0356 | 166 | 17 | 438 | 461 |
| BAObb0418.01 | BA0417 | 171 | 15 | 44 | 65 |
| BAObb0418.02 | BA0417 | 171 | 1 | 61 | 82 |
| BAObb0418.03 | BA0417 | 171 | 1 | 78 | 99 |
| BAObb0420.01 | BA0419 | 172 | 5 | 1230 | 1254 |
| BAObb0420.02 | BA0419 | 172 | 7 | 150 | 1275 |
| BAObb0436.01 | BA0431 | 174 | 7 | 372 | 395 |
| BAObb0436.02 | BA0431 | 174 | 4 | 391 | 414 |
| BAObb0436.03 | BA0431 | 174 | 5 | 410 | 434 |
| BAObb0446.01 | BA0442 | 175 | 5 | 439 | 464 |
| BAObb0512.01 | BA0507 | 179 | 17 | 718 | 744 |
| BAObb0512.02 | BA0507 | 179 | 15 | 740 | 766 |
| BAObb0512.03 | BA0507 | 179 | 17 | 762 | 788 |
| BAObb0512.04 | BA0507 | 179 | 17 | 906 | 931 |
| BAObb0512.05 | BA0507 | 179 | 17 | 927 | 951 |
| BAObb0512.06 | BA0507 | 179 | 17 | 947 | 971 |
| BAObb0518.01 | BA0513 | 180 | 1 | 66 | 93 |
| BAObb0518.04 | BA0513 | 180 | 1 | 135 | 161 |
| BAObb0518.05 | BA0513 | 180 | 2 | 494 | 518 |
| BAObb0519.01 | BA0514 | 181 | 7 | 40 | 61 |
| BAObb0519.02 | BA0514 | 181 | 11 | 57 | 79 |
| BAObb0519.03 | BA0514 | 181 | 8 | 75 | 97 |
| BAObb0579.01 | BA0572 | 186 | 2 | 440 | 462 |
| BAObb0579.02 | BA0572 | 186 | 4 | 458 | 480 |
| BAObb0579.03 | BA0572 | 186 | 2 | 476 | 497 |
| BAObb0588.01 | BA0581 | 187 | 5 | 91 | 114 |
| BAObb0588.02 | BA0581 | 187 | 5 | 110 | 133 |
| BAObb0588.03 | BA0581 | 187 | 4 | 129 | 152 |
| BAObb0588.04 | BA0581 | 187 | 3 | 148 | 170 |
| BAObb0612.01 | BA0605 | 190 | 16 | 156 | 183 |
| BAObb0612.02 | BA0605 | 190 | 12 | 179 | 206 |
| BAObb0612.03 | BA0605 | 190 | 16 | 202 | 229 |
| BAObb0612.04 | BA0605 | 190 | 17 | 225 | 252 |
| BAObb0612.05 | BA0605 | 190 | 15 | 248 | 274 |
| BAObb0613.01 | BA0606 | 191 | 11 | 747 | 773 |
| BAObb0613.02 | BA0606 | 191 | 13 | 769 | 795 |
| BAObb0649.01 | BA0644 | 194 | 9 | 6 | 33 |
| BAObb0649.02 | BA0644 | 194 | 9 | 29 | 55 |
| BAObb0649.03 | BA0644 | 194 | 13 | 52 | 79 |
| BAObb0649.04 | BA0644 | 194 | 2 | 74 | 100 |
| BAObb0658.01 | BA0653 | 195 | 15 | 148 | 176 |
| BAObb0658.02 | BA0653 | 195 | 16 | 172 | 200 |
| BAObb0658.03 | BA0653 | 195 | 16 | 196 | 223 |
| BAObb0680.01 | BA0675 | 198 | 14 | 28 | 53 |
| BAObb0680.02 | BA0675 | 198 | 15 | 49 | 73 |
| BAObb0680.03 | BA0675 | 198 | 17 | 165 | 188 |
| BAObb0680.05 | BA0675 | 198 | 16 | 203 | 226 |
| BAObb0680.06 | BA0675 | 198 | 2 | 292 | 320 |
| BAObb0680.07 | BA0675 | 198 | 1 | 316 | 344 |
| BAObb0680.08 | BA0675 | 198 | 2 | 531 | 560 |
| BAObb0710.01 | BA0703 | 200 | 5 | 180 | 208 |
| BAObb0710.02 | BA0703 | 200 | 5 | 200 | 228 |
| BAObb0754.01 | BA0748 | 204 | 4 | 203 | 227 |
| BAObb0754.02 | BA0748 | 204 | 9 | 223 | 247 |
| BAObb0754.03 | BA0748 | 204 | 4 | 243 | 267 |
| BAObb0754.04 | BA0748 | 204 | 6 | 263 | 287 |
| BAObb0783.02 | BA0778 | 208 | 2 | 339 | 363 |
| BAObb0783.03 | BA0778 | 208 | 1 | 359 | 384 |
| BAObb0794.03 | BA0790 | 210 | 7 | 1372 | 1398 |
| BAObb0796.01 | BA0792 | 211 | 16 | 14 | 38 |
| BAObb0796.02 | BA0792 | 211 | 3 | 34 | 58 |
| BAObb0796.04 | BA0792 | 211 | 7 | 74 | 98 |
| BAObb0796.05 | BA0792 | 211 | 2 | 94 | 117 |
| BAObba03.01 | BAP002 | 214 | 1 | 41 | 67 |
| BAObba03.02 | BAP002 | 214 | 3 | 63 | 89 |
| BAObba03.05 | BAP002 | 214 | 1 | 129 | 155 |
| BAObba04.01 | BAP003 | 215 | 1 | 165 | 185 |
| BAObba04.02 | BAP003 | 215 | 5 | 181 | 200 |
| BAObba21.01 | BAP004 | 216 | 5 | 26 | 44 |
| BAObba24.01 | BAP005 | 217 | 3 | 15 | 44 |
| BAObba24.02 | BAP005 | 217 | 2 | 40 | 68 |
| BAObba24.03 | BAP005 | 217 | 1 | 64 | 92 |
| BAObba36.03 | BAP007 | 219 | 1 | 90 | 114 |
| BAObba36.04 | BAP007 | 219 | 1 | 110 | 133 |
| BAObba36.05 | BAP007 | 219 | 2 | 140 | 168 |
| BAObba36.06 | BAP007 | 219 | 2 | 164 | 192 |
| BAObba36.07 | BAP007 | 219 | 2 | 188 | 215 |
| BAObba57.01 | BAP008 | 220 | 4 | 91 | 116 |
| BAObba57.02 | BAP008 | 220 | 6 | 112 | 137 |
| BAObba57.03 | BAP008 | 220 | 6 | 133 | 158 |
| BAObba57.04 | BAP008 | 220 | 8 | 154 | 179 |
| BAObbb16.01 | BAP011 | 223 | 8 | 311 | 338 |
| BAObbb16.02 | BAP011 | 223 | 6 | 334 | 361 |
| BAObbb16.03 | BAP011 | 223 | 9 | 357 | 385 |
| BAObbb16.04 | BAP011 | 223 | 7 | 381 | 409 |
| BAObbb16.05 | BAP011 | 223 | 8 | 405 | 433 |
| BAObbb17.01 | BAP012 | 224 | 9 | 331 | 352 |
| BAObbb17.02 | BAP012 | 224 | 9 | 348 | 369 |
| BAObbb17.03 | BAP012 | 224 | 4 | 365 | 386 |
| BAObbb19.01 | BAP013 | 225 | 12 | 116 | 143 |
| BAObbb19.01 | BAP013 | 225 | 6 | 116 | 143 |
| BAObbb19.02 | BAP013 | 225 | 14 | 139 | 166 |
| BAObbb19.02 | BAP013 | 225 | 2 | 139 | 166 |
| BAObbb19.03 | BAP013 | 225 | 20 | 162 | 189 |
| BAObbb19.03 | BAP013 | 225 | 9 | 162 | 189 |
| BAObbb19.04 | BAP013 | 225 | 17 | 185 | 212 |
| BAObbb19.04 | BAP013 | 225 | 9 | 185 | 212 |
| BAObbc01.01 | BAP014 | 226 | 3 | 208 | 230 |
| BAObbg12.01 | BAP016 | 228 | 5 | 32 | 45 |
| BAObbg12.02 | BAP016 | 228 | 4 | 50 | 72 |
| BAObbg21.02 | BAP017 | 229 | 3 | 131 | 153 |
| BAObbg21.03 | BAP017 | 229 | 9 | 149 | 172 |
| BAObbg21.04 | BAP017 | 229 | 5 | 324 | 349 |
| BAObbg21.05 | BAP017 | 229 | 1 | 345 | 370 |
| BAObbg21.06 | BAP017 | 229 | 14 | 366 | 391 |
| BAObbg23.01 | BAP018 | 230 | 8 | 104 | 126 |
| BAObbg23.02 | BAP018 | 230 | 6 | 122 | 143 |
| BAObbg23.03 | BAP018 | 230 | 7 | 148 | 174 |
| BAObbg23.04 | BAP018 | 230 | 2 | 170 | 195 |
| BAObbg24.02 | BAP019 | 231 | 15 | 91 | 115 |
| BAObbg24.03 | BAP019 | 231 | 13 | 111 | 135 |
| BAObbg24.04 | BAP019 | 231 | 5 | 377 | 400 |
| BAObbg24.05 | BAP019 | 231 | 13 | 396 | 419 |
| BAObbg24.06 | BAP019 | 231 | 3 | 532 | 553 |
| BAObbg24.07 | BAP019 | 231 | 3 | 548 | 569 |
| BAObbg24.08 | BAP019 | 231 | 2 | 715 | 744 |
| BAObbg24.09 | BAP019 | 231 | 4 | 740 | 768 |
| BAObbg33.01 | BAP021 | 233 | 7 | 3 | 27 |
| BAObbg33.02 | BAP021 | 233 | 7 | 23 | 47 |
| BAObbg33.03 | BAP021 | 233 | 2 | 43 | 68 |
| BAObbh09.02 | BAP022 | 234 | 2 | 118 | 141 |
| BAObbh09.03 | BAP022 | 234 | 8 | 137 | 160 |
| BAObbh09.05 | BAP022 | 234 | 1 | 521 | 545 |
| BAObbh13.01 | BAP021 | 233 | 4 | 4 | 30 |
| BAObbh13.02 | BAP021 | 233 | 6 | 26 | 52 |
| BAObbh13.03 | BAP021 | 233 | 3 | 48 | 75 |
| BAObbj41.01 | BAP023 | 235 | 5 | 61 | 84 |
| BAObbj41.02 | BAP023 | 235 | 8 | 80 | 103 |
| BAObbj41.03 | BAP023 | 235 | 1 | 99 | 122 |
| BAObbl06.01 | BAP025 | 237 | 5 | 20 | 43 |
| BAObbl06.02 | BAP025 | 237 | 17 | 39 | 62 |
| BAObbl06.03 | BAP025 | 237 | 4 | 95 | 122 |
| BAObbl06.04 | BAP025 | 237 | 16 | 117 | 143 |
| BAObbn15.01 | BAP028 | 240 | 11 | 195 | 219 |
| BAObbn15.02 | BAP028 | 240 | 10 | 215 | 239 |
| BAObbn15.03 | BAP028 | 240 | 8 | 235 | 259 |
| BAObbo34.02 | BAP030 | 242 | 2 | 27 | 54 |
| BAObbo40.01 | BAP029 | 241 | 5 | 197 | 217 |
| BAObbo40.02 | BAP029 | 241 | 3 | 213 | 232 |
| BAObbp28.01 | BAP032 | 244 | 1 | 48 | 73 |
| BAObbp28.02 | BAP032 | 244 | 2 | 69 | 94 |
| BAObbp28.03 | BAP032 | 244 | 1 | 90 | 114 |
| BAObbq13.01 | BAP025 | 237 | 2 | 133 | 159 |
| BAObbq13.02 | BAP025 | 237 | 7 | 155 | 181 |
| BAObbq32.01 | BAP034 | 246 | 1 | 14 | 41 |
| BAObbq32.02 | BAP034 | 246 | 2 | 37 | 63 |
| BAObbq34.02 | BAP043 | 255 | 17 | 29 | 52 |
| BAObbq34.03 | BAP043 | 255 | 9 | 48 | 70 |
| BAObbr27.01 | BAP026 | 238 | 9 | 1 | 29 |
| BAObbr27.02 | BAP026 | 238 | 5 | 24 | 53 |
| BAObbr27.03 | BAP026 | 238 | 3 | 49 | 76 |
| BAObbr35.01 | BAP036 | 248 | 17 | 1 | 21 |
| BAObbr35.02 | BAP036 | 248 | 17 | 17 | 44 |
| BAObbr42.01 | BAP031 | 243 | 2 | 122 | 149 |
| BAObbr42.02 | BAP031 | 243 | 2 | 145 | 172 |
| BAObbs36.01 | BAP037/8 | 249 | 1 | 3 | 27 |
| BAObbs36.02 | BAP037/8 | 249 | 11 | 23 | 47 |
| BAObbs36.03 | BAP037/8 | 249 | 2 | 43 | 66 |
| BAObbs36.04 | BAP037/8 | 249 | 1 | 62 | 85 |
| BAObbs36.05 | BAP037/8 | 249 | 1 | 136 | 165 |
| BAObbs36.06 | BAP037/8 | 249 | 17 | 156 | 185 |
| BAObbs36.07 | BAP037/8 | 249 | 0 | 81 | 107 |
| BAObbs36.08 | BAP037/8 | 249 | 8 | 103 | 129 |
| BAObbs41.01 | BAP031 | 243 | 8 | 160 | 186 |
| BAObbs41.02 | BAP031 | 243 | 6 | 182 | 208 |
| BAObbs42.01 | BAP045 | 257 | 20 | 27 | 51 |
| BAObbs42.02 | BAP045 | 257 | 10 | 47 | 72 |
| BAObg0061.01 | BA0060 | 136 | 10 | 177 | 191 |
| BAObga26.01 | BAP039 | 251 | 4 | 27 | 51 |
| BAObga26.02 | BAP039 | 251 | 7 | 47 | 71 |
| BAObga26.03 | BAP039 | 251 | 5 | 67 | 91 |
| BAObgp001.01 | BAP035 | 247 | 5 | 7 | 30 |
| BAObgp001.02 | BAP035 | 247 | 8 | 26 | 49 |
| BAObgp001.03 | BAP035 | 247 | 3 | 45 | 69 |
| BAObgp001.04 | BAP035 | 247 | 9 | 65 | 89 |
| BAObgp003.01 | BAP020 | 232 | 9 | 126 | 137 |
| BAObgp022.01 | BAP040 | 252 | 2 | 22 | 43 |
| BAObgp022.02 | BAP040 | 252 | 8 | 39 | 60 |
| BAObgp022.03 | BAP040 | 252 | 10 | 56 | 78 |
| BAObgp027.01 | BAP015 | 227 | 7 | 693 | 718 |
| BAObgp027.02 | BAP015 | 227 | 6 | 714 | 739 |
| BAObgp027.03 | BAP015 | 227 | 3 | 438 | 460 |
| BAObgp027.04 | BAP015 | 227 | 1 | 456 | 477 |
| BAObgp027.05 | BAP015 | 227 | 10 | 473 | 495 |
| BAObgp027.06 | BAP015 | 227 | 3 | 806 | 828 |
| BAObgp027.07 | BAP015 | 227 | 9 | 824 | 846 |
| BAObgp027.08 | BAP015 | 227 | 11 | 616 | 640 |
| BAObgp027.09 | BAP015 | 227 | 7 | 636 | 659 |
| BAObgp027.10 | BAP015 | 227 | 9 | 655 | 678 |
| BAObgp027.11 | BAP015 | 227 | 8 | 674 | 697 |
| BAObgp027.12 | BAP015 | 227 | 8 | 576 | 598 |
| BAObgp027.13 | BAP015 | 227 | 5 | 594 | 615 |
| BAObgp027.14 | BAP015 | 227 | 7 | 611 | 632 |
| BAObgp027.15 | BAP015 | 227 | 6 | 851 | 877 |
| BAObgp027.16 | BAP015 | 227 | 8 | 873 | 898 |
| BAObgp027.17 | BAP015 | 227 | 9 | 731 | 760 |
| BAObgp027.18 | BAP015 | 227 | 10 | 756 | 784 |
| BAObgp027.19 | BAP015 | 227 | 2 | 3 | 27 |
| BAObgp027.20 | BAP015 | 227 | 5 | 23 | 48 |
| BAObgp027.21 | BAP015 | 227 | 3 | 957 | 982 |
| BAObgp027.22 | BAP015 | 227 | 18 | 978 | 1002 |
| BAObgp036.01 | BAP041 | 253 | 14 | 157 | 182 |
| BAObgp036.02 | BAP041 | 253 | 5 | 178 | 203 |
| BAObgp036.03 | BAP041 | 253 | 5 | 199 | 224 |
| BAObgp036.04 | BAP041 | 253 | 4 | 220 | 246 |
| BAObgp085.01 | BAP042 | 254 | 13 | 70 | 94 |
| BAObgp085.02 | BAP042 | 254 | 2 | 90 | 113 |
| BAObgp096.01 | BAP001 | 213 | 19 | 20 | 44 |
| BAObgp096.02 | BAP001 | 213 | 7 | 40 | 64 |
| BAObgp096.03 | BAP001 | 213 | 16 | 60 | 84 |
| BAObgp096.04 | BAP001 | 213 | 5 | 80 | 104 |
| BAObgp096.05 | BAP001 | 213 | 4 | 138 | 162 |
| BAObgp096.06 | BAP001 | 213 | 14 | 158 | 182 |
| BAObgp096.07 | BAP001 | 213 | 6 | 178 | 201 |
| BAObgp321.01 | BAP044 | 256 | 13 | 1 | 25 |
| BAObgp321.02 | BAP044 | 256 | 17 | 21 | 45 |
| BAObgp321.03 | BAP044 | 256 | 17 | 41 | 65 |
| BAObgp43.01 | BAP027 | 239 | 3 | 121 | 143 |
| BAObgp43.02 | BAP027 | 239 | 12 | 139 | 160 |
| BAObgp43.03 | BAP027 | 239 | 19 | 156 | 178 |
| BAOflaA.01 | BA0663 | 196 | 17 | 12 | 39 |
| BAOflaA.02 | BA0663 | 196 | 2 | 35 | 62 |
| BAOflaA.03 | BA0663 | 196 | 8 | 58 | 84 |
| BAOflaA.05 | BA0663 | 196 | 16 | 175 | 197 |
| BAOflaB.01 | BA0149 | 146 | 12 | 18 | 42 |
| BAOflaB.02 | BA0149 | 146 | 3 | 38 | 62 |
| BAOflaB.03 | BA0149 | 146 | 2 | 58 | 82 |
| BAOflaB.04 | BA0149 | 146 | 15 | 78 | 102 |
| BAOflaB.05 | BA0149 | 146 | 2 | 98 | 122 |
| BAOflaB.06 | BA0149 | 146 | 4 | 118 | 142 |
| BAOflaB.07 | BA0149 | 146 | 5 | 138 | 165 |
| BAOflaB.08 | BA0149 | 146 | 1 | 256 | 279 |
| BAOflaB.09 | BA0149 | 146 | 6 | 275 | 297 |
| BAOflaB.10 | BA0149 | 146 | 1 | 293 | 315 |
| BAOflaB.11 | BA0149 | 146 | 9 | 163 | 189 |
| BAOflaB.12 | BA0149 | 146 | 12 | 185 | 211 |
| BAOflaB.13 | BA0149 | 146 | 14 | 207 | 233 |
| BAOflaB.14 | BA0149 | 146 | 1 | 229 | 255 |
| BAOfliD.02 | BA0150 | 147 | 3 | 46 | 75 |
| BAOfliD.03 | BA0150 | 147 | 2 | 110 | 131 |
| BAOfliD.04 | BA0150 | 147 | 4 | 127 | 148 |
| BAOfliD.05 | BA0150 | 147 | 7 | 188 | 216 |
| BAOfliD.06 | BA0150 | 147 | 1 | 212 | 240 |
| BAOfliD.07 | BA0150 | 147 | 1 | 344 | 367 |
| BAOfliD.08 | BA0150 | 147 | 5 | 361 | 384 |
| BAOfliD.09 | BA0150 | 147 | 3 | 382 | 405 |
| BAOfliD.10 | BA0150 | 147 | 1 | 401 | 424 |
| BAOfliG-1.01 | BA0221 | 154 | 9 | 151 | 180 |
| BAOfliG-1.02 | BA0221 | 154 | 7 | 176 | 205 |
| BAOfliG-1.03 | BA0221 | 154 | 10 | 245 | 274 |
| BAOfliG-1.04 | BA0221 | 154 | 16 | 270 | 299 |
| BAOlmp1.01 | BA0210 | 152 | 6 | 937 | 962 |
| BAOlmp1.02 | BA0210 | 152 | 4 | 958 | 983 |
| BAOlmp1.03 | BA0210 | 152 | 2 | 102 | 130 |
| BAOlmp1.04 | BA0210 | 152 | 1 | 126 | 154 |
| BAOlmp1.05 | BA0210 | 152 | 2 | 150 | 177 |
| BAOlmp1.06 | BA0210 | 152 | 2 | 823 | 849 |
| BAOlmp1.07 | BA0210 | 152 | 2 | 845 | 872 |
| BAOlmp1.08 | BA0210 | 152 | 3 | 867 | 892 |
| BAOlmp1.09 | BA0210 | 152 | 2 | 285 | 314 |
| BAOlmp1.10 | BA0210 | 152 | 5 | 310 | 339 |
| BAOlmp1.11 | BA0210 | 152 | 3 | 335 | 364 |
| BAOomp.01 | BAP033 | 245 | 3 | 97 | 119 |
| BAOomp.02 | BAP033 | 245 | 4 | 115 | 137 |
| BAOomp.03 | BAP033 | 245 | 1 | 133 | 155 |
| BAOomp.04 | BAP033 | 245 | 5 | 151 | 173 |
| BAOoppA-2.01 | BA0327 | 161 | 2 | 20 | 43 |
| BAOoppA-2.02 | BA0327 | 161 | 1 | 39 | 62 |
| BAOoppA-2.03 | BA0327 | 161 | 1 | 58 | 79 |
| BAOoppA-2.04 | BA0327 | 161 | 9 | 69 | 94 |
| BAOoppA-2.05 | BA0327 | 161 | 3 | 90 | 115 |
| BAOoppA-2.06 | BA0327 | 161 | 4 | 167 | 189 |
| BAOoppA-2.07 | BA0327 | 161 | 11 | 185 | 207 |
| BAOoppA-2.08 | BA0327 | 161 | 14 | 203 | 224 |
| BAOoppA-2.09 | BA0327 | 161 | 9 | 296 | 320 |
| BAOoppA-2.10 | BA0327 | 161 | 9 | 316 | 339 |
| BAOoppA-2.11 | BA0327 | 161 | 10 | 335 | 358 |
| BAOoppA-2.12 | BA0327 | 161 | 9 | 354 | 377 |
| BAOoppA-2.13 | BA0327 | 161 | 10 | 404 | 431 |
| BAOoppA-2.14 | BA0327 | 161 | 8 | 427 | 453 |
| BAOoppA-2.15 | BA0327 | 161 | 15 | 449 | 475 |
| BAOoppA-2.16 | BA0327 | 161 | 16 | 471 | 498 |
| BAOoppA-2.17 | BA0327 | 161 | 9 | 494 | 521 |
| BAOoppA-3.01 | BA0329 | 162 | 1 | 40 | 62 |
| BAOoppA-3.03 | BA0329 | 162 | 1 | 76 | 97 |
| BAOoppA-3.04 | BA0329 | 162 | 1 | 251 | 276 |
| BAOoppA-3.05 | BA0329 | 162 | 15 | 272 | 297 |
| BAOoppA-3.06 | BA0329 | 162 | 17 | 291 | 316 |
| BAOoppA-3.08 | BA0329 | 162 | 1 | 333 | 358 |
| BAOoppA-4.01 | BAP006 | 218 | 16 | 335 | 360 |
| BAOoppA-4.02 | BAP006 | 218 | 6 | 356 | 381 |
| BAOoppA-4.03 | BAP006 | 218 | 2 | 422 | 446 |
| BAOoppA-4.04 | BAP006 | 218 | 6 | 442 | 465 |
| BAOoppA-4.05 | BAP006 | 218 | 1 | 461 | 484 |
| BAOp35.03 | BAP024 | 236 | 1 | 46 | 69 |
| BAOp35.04 | BAP024 | 236 | 11 | 65 | 88 |
| BAOp35.05 | BAP024 | 236 | 11 | 84 | 107 |
| BAOp35.07 | BAP024 | 236 | 1 | 124 | 149 |
| BAOp35.10 | BAP024 | 236 | 4 | 186 | 211 |
| BAOp35.11 | BAP024 | 236 | 13 | 207 | 232 |
| BAOp35.12 | BAP024 | 236 | 12 | 265 | 294 |
| BAOp35.13 | BAP024 | 236 | 1 | 290 | 318 |
| BAOp66.02 | BA0596 | 188 | 2 | 56 | 80 |
| BAOp66.03 | BA0596 | 188 | 1 | 76 | 100 |
| BAOp66.04 | BA0596 | 188 | 16 | 96 | 119 |
| BAOp66.05 | BA0596 | 188 | 3 | 343 | 371 |
| BAOp66.06 | BA0596 | 188 | 4 | 367 | 394 |
| BAOp66.07 | BA0596 | 188 | 3 | 410 | 436 |
| BAOp66.08 | BA0596 | 188 | 1 | 432 | 457 |
| BAOp83.03 | BA0737 | 202 | 2 | 281 | 307 |
| BAOp83.13 | BA0737 | 202 | 1 | 631 | 654 |
| BAOpbp-1.01 | BA0135 | 145 | 10 | 41 | 66 |
| BAOpbp-1.02 | BA0135 | 145 | 9 | 62 | 86 |
| BAOpbp-1.03 | BA0135 | 145 | 2 | 82 | 106 |
| BAOpbp-1.04 | BA0135 | 145 | 3 | 102 | 126 |
| BAOpbp-1.05 | BA0135 | 145 | 2 | 417 | 444 |
| BAOpbp-1.06 | BA0135 | 145 | 2 | 440 | 466 |
| BAOpbp-1.07 | BA0135 | 145 | 6 | 528 | 554 |
| BAOpbp-1.08 | BA0135 | 145 | 18 | 550 | 575 |
| BAOpbp-1.09 | BA0135 | 145 | 3 | 571 | 596 |

Table 7: FACS Analysis with Epitope Sera Generated in Mice.

[0297] The epitope specific antibodies in mice sera were tested in FACS analysis for binding to the surface of B. afzelii strain K78 cells. The sera that showed a significant shift in FACS analysis are listed. The percentage indicates the number of cells that showed a shift in the FACS analysis in comparison to cells incubated without immune sera.

TABLE 7

| | Seq ID | Injection | |
|---|---|---|---|
| ORF | (Protein) | name | FACS |
| BA0056 | 135 | Baf28 | 91% |
| | | Baf29 | 90% |
| BA0135 | 145 | Baf22 | 75% |
| BA0149 | 146 | Baf11 | 60% |
| | | Baf12 | 46% |
| BA0150 | 147 | Baf23 | 23% |
| | | Baf24 | 43% |
| BA0181 | 149 | Baf36 | 62% |
| BA0210 | 152 | Baf1 | 36% |
| | | Baf2 | 80% |
| BA0221 | 154 | Baf26 | 87% |
| BA0237 | 156 | Baf15 | 28% |
| BA0283 | 157 | Baf37 | 62% |
| BA0327 | 161 | Baf18 | 77% |
| | | Baf19 | 58% |
| BA0329 | 162 | Baf34 | 25% |
| BA0469 | 177 | Baf108 | 20% |
| BA0507 | 179 | Baf39 | 21% |
| BA0596 | 188 | Baf40 | 30% |
| | | Baf41 | 27% |
| BA0605 | 190 | Baf42 | 45% |
| BA0619 | 192 | Baf30 | 24% |
| BA0653 | 195 | Baf43 | 48% |
| BA0737 | 202 | Baf16 | 83% |
| BA0767 | 207 | Baf121 | 27% |
| BA0790 | 210 | Baf48 | 67% |
| BAP006 | 218 | Baf25 | 30% |
| BAP015 | 227 | Baf6 | 76% |
| | | Baf8 | 21% |
| BAP019 | 231 | Baf4 | 64% |
| | | Baf5 | 86% |
| BAP021 | 233 | Baf143 | 26% |
| BAP022 | 234 | Baf50 | 28% |
| BAP024 | 236 | Baf13 | 96% |
| BAP025 | 237 | Baf75 | 22% |
| BAP030 | 242 | Baf52 | 22% |
| BAP033 | 245 | Baf32 | 74% |
| BAP034 | 246 | Baf53 | 39% |
| BAP035 | 247 | Baf125 | 20% |
| BAP037/ | 249 | Baf10 | 86% |
| BAP038 | 250 | | |

### Table 8: Expressed and Purified Proteins Tested in Animals.

[0298] The table lists the expressed and purified proteins which were tested in the Borrelia animal model. Ba: Borrelia afzelii, ORF: open reading frame, BB: beta barrel, SP: signal peptide, LP: signal peptide for lipidation, Mw: molecular weight, kDa: kilo Dalton.

TABLE 8

| | amino | | | | | | |
|---|---|---|---|---|---|---|---|
| | acid | | | | | Amino | |
| | SEQ | | | | | acid | |
| Ba | ID | | | Mw | Protein | From- | Purification |
| ORF | NO: | Common name | Motifs | (kDa) | Construct | To | status |
| BA0056 | 135 | hypothetical protein | BB | 76.5 | BB0058-1 | 91-415 | Insoluble |
| BA0210 | 152 | surface-located | SP | 128.2 | Bbu0210-1 | 27-246 | Soluble |
| | | membrane protein 1 | | | | | |
| | | (lmp1) | | | | | |
| BA0210 | 152 | surface-located | SP | 128.2 | Bbu0210-2 | 701-1067 | Insoluble |
| | | membrane protein 1 | | | | | |
| | | (lmp1) | | | | | |
| BA0221 | 154 | flagellar motor switch | | 47.9 | Baf0221 | 1-408 | Insoluble |
| | | protein (fliG-1) | | | | | |
| BA0237 | 156 | hypothetical protein | SP | 30.5 | Baf0237 | 21-257 | Insoluble |
| BA0507 | 179 | hypothetical protein | | 254.2 | Baf0512-2 | 399-870 | Insoluble |
| BA0581 | 187 | pfs protein (pfs-2) | SP | 29.2 | Baf0581 | 22-264 | Insoluble |
| BA0605 | 190 | ATP-dependent Clp | | 47.7 | Baf0627 | 1-430 | Insoluble |
| | | protease, subunit X | | | | | |
| | | (clpX) | | | | | |
| BA0675 | 198 | methyl-accepting | SP | 84.7 | Bbu0680-2 | 391-753 | Insoluble |
| | | chemotaxis protein | | | | | |
| | | (mcp-4) | | | | | |
| BA0790 | 210 | hypothetical protein | BB, | 168.9 | BB0794-3 | 979-1467 | Insoluble |
| | | | SP | | | | |
| BAP006 | 218 | oligopeptide ABC | LP | 61.1 | BbuA0034-1 | 251-528 | Insoluble |
| | | transporter, | | | | | |
| | | periplasmic | | | | | |
| | | oligopeptide-binding | | | | | |
| | | protein (oppAV) | | | | | |

Table 9: Most Probable Number of Cells (from Norman, R. L. and Kempe, L. L., 1960).

[0299] This table shows the most probable number of cells (MPN^{#}) with 95% confidence limits (95% CL). The most probable number of bacteria is read from the table by comparing the number of wells with live bacteria (Positive) for the different dilutions with the entries in the table. The MPN is the number of cells at the lowest dilution (10 cells/well).

TABLE 9

| Positive | | |
|---|---|---|
| 10; 1; 0.1 | MPN^{#} | 95% CL |
| 8 8 7 | 208 | 80.9-535 |
| 8 8 6 | 139 | 54.1-357 |
| 8 8 5 | 98.2 | 38.2-252 |
| 8 8 4 | 70.2 | 27.3-180 |
| 8 8 3 | 51.0 | 19.8-131 |
| 8 8 2 | 38.5 | 15.0-98.9 |
| 8 8 1 | 30.1 | 11.7-77.4 |
| 8 8 0 | 24.0 | 9.34-61.7 |
| 8 7 8 | 59.6 | 23.2-153 |
| 8 7 7 | 50.8 | 19.8-131 |
| 8 7 6 | 43.3 | 16.8-111 |
| 8 7 5 | 36.9 | 14.4-94.8 |
| 8 7 4 | 31.4 | 12.2-80.7 |
| 8 7 3 | 26.7 | 10.4-68.6 |
| 8 7 2 | 22.6 | 8.79-58.1 |
| 8 7 1 | 19.1 | 7.43-49.1 |
| 8 7 0 | 15.9 | 6.19-40.9 |
| 8 6 6 | 28.4 | 11.1-73.0 |
| 8 6 5 | 25.0 | 9.73-64.3 |
| 8 6 4 | 21.8 | 8.48-56.0 |
| 8 6 3 | 18.9 | 7.35-48.6 |
| 8 6 2 | 16.3 | 6.34-41.9 |
| 8 6 1 | 13.8 | 5.37-35.5 |
| 8 6 0 | 11.5 | 4.47-29.6 |
| 8 5 5 | 18.9 | 7.35-48.6 |
| 8 5 4 | 16.6 | 6.46-42.7 |
| 8 5 3 | 14.4 | 5.60-37.0 |
| 8 5 2 | 12.3 | 4.79-31.6 |
| 8 5 1 | 10.3 | 4.01-26.5 |
| 8 5 0 | 8.42 | 3.28-21.6 |
| 8 4 5 | 14.8 | 5.76-38.0 |
| 8 4 4 | 13.0 | 5.06-33.4 |
| 8 4 3 | 11.1 | 4.32-28.5 |
| 8 4 2 | 9.40 | 3.66-24.2 |
| 8 4 1 | 7.74 | 3.01-19.9 |
| 8 4 0 | 6.22 | 2.42-16.0 |
| 8 3 5 | 11.8 | 4.59-30.3 |
| 8 3 4 | 10.2 | 3.97-26.2 |
| 8 3 3 | 8.67 | 3.37-22.3 |
| 8 3 2 | 7.18 | 2.79-18.5 |
| 8 3 1 | 5.82 | 2.26-15.0 |
| 8 3 0 | 4.67 | 1.82-12.0 |
| 8 2 4 | 8.07 | 3.14-20.7 |
| 8 2 3 | 6.72 | 2.61-17.3 |
| 8 2 2 | 5.50 | 2.14-14.1 |
| 8 2 1 | 4.45 | 1.73-11.4 |
| 8 2 0 | 3.62 | 1.41-9.30 |
| 8 1 3 | 5.22 | 2.03-13.4 |
| 8 1 2 | 4.27 | 1.66-11.0 |
| 8 1 1 | 3.50 | 1.36-9.00 |
| 8 1 0 | 2.87 | 1.12-7.38 |
| 8 0 2 | 3.38 | 1.32-8.69 |
| 8 0 1 | 2.80 | 1.09-7.20 |
| 8 0 0 | 2.31 | 0.90-5.94 |
| 7 7 1 | 5.47 | 2.13-14.1 |
| 7 7 0 | 4.84 | 1.88-12.4 |
| 7 6 2 | 5.30 | 2.06-13.6 |
| 7 6 1 | 4.71 | 1.83-12.1 |
| 7 6 0 | 4.15 | 1.61-10.7 |
| 7 5 2 | 4.58 | 1.78-11.8 |
| 7 5 1 | 4.04 | 1.57-10.4 |
| 7 5 0 | 3.55 | 1.38-9.12 |
| 7 4 3 | 4.46 | 1.74-11.5 |
| 7 4 2 | 3.95 | 1.54-10.2 |
| 7 4 1 | 3.47 | 1.35-8.92 |
| 7 4 0 | 3.04 | 1.18-7.81 |
| 7 3 3 | 3.86 | 1.50-9.92 |
| 7 3 2 | 3.40 | 1.32-8.74 |
| 7 3 1 | 2.98 | 1.16-7.66 |
| 7 3 0 | 2.59 | 1.01-6.66 |
| 7 2 3 | 3.33 | 1.30-8.56 |
| 7 2 2 | 2.92 | 1.14-7.50 |
| 7 2 1 | 2.55 | 0.99-6.55 |
| 7 2 0 | 2.20 | 0.86-5.65 |
| 7 1 3 | 2.87 | 1.12-7.38 |
| 7 1 2 | 2.51 | 0.98-6.45 |
| 7 1 1 | 2.17 | 0.84-5.58 |
| 7 1 0 | 1.86 | 0.72-4.78 |
| 7 0 2 | 2.14 | 0.83-5.50 |
| 7 0 1 | 1.83 | 0.71-4.70 |
| 7 0 0 | 1.55 | 0.60-3.98 |
| 6 6 1 | 3.08 | 1.20-7.92 |
| 6 6 0 | 2.77 | 1.08-7.12 |
| 6 5 1 | 2.73 | 1.06-7.02 |
| 6 5 0 | 2.44 | 0.95-6.27 |
| 6 4 2 | 2.96 | 1.05-6.91 |
| 6 4 1 | 2.41 | 0.94-6.19 |
| 6 4 0 | 2.14 | 0.83-5.50 |
| 6 3 2 | 2.38 | 0.93-6.12 |
| 6 3 1 | 2.11 | 0.82-5.42 |
| 6 3 0 | 1.86 | 0.72-4.78 |
| 6 2 2 | 2.09 | 0.81-5.37 |
| 6 2 1 | 1.84 | 0.72-4.73 |
| 6 2 0 | 1.60 | 0.62-4.11 |
| 6 1 2 | 1.82 | 0.71-4.68 |
| 6 1 1 | 1.58 | 0.61-4.06 |
| 6 1 0 | 1.35 | 0.53-3.47 |
| 6 0 2 | 1.56 | 0.61-4.01 |
| 6 0 1 | 1.34 | 0.52-3.44 |
| 6 0 0 | 1.13 | 0.44-2.90 |
| 5 5 1 | 2.07 | 0.81-5.32 |
| 5 5 0 | 1.85 | 0.72-4.75 |
| 5 4 1 | 1.84 | 0.72-4.73 |
| 5 4 0 | 1.63 | 0.63-4.19 |
| 5 3 2 | 1.82 | 0.71-4.68 |
| 5 3 1 | 1.61 | 0.63-4.14 |
| 5 3 0 | 1.41 | 0.55-3.62 |
| 5 2 2 | 1.60 | 0.62-4.11 |
| 5 2 1 | 1.40 | 0.54-3.60 |
| 5 2 0 | 1.21 | 0.47-3.11 |
| 5 1 2 | 1.39 | 0.54-3.57 |
| 5 1 1 | 1.20 | 0.47-3.08 |
| 5 1 0 | 1.01 | 0.39-2.60 |
| 5 0 2 | 1.19 | 0.46-3.06 |
| 5 0 1 | 1.01 | 0.39-2.60 |
| 5 0 0 | 0.83 | 0.32-2.13 |
| 4 4 0 | 1.28 | 0.50-3.29 |
| 4 3 1 | 1.27 | 0.49-3.26 |
| 4 3 0 | 1.10 | 0.43-2.83 |
| 4 2 1 | 1.09 | 0.42-2.80 |
| 4 2 0 | 0.93 | 0.36-2.39 |
| 4 1 2 | 1.08 | 0.42-2.78 |
| 4 1 1 | 0.92 | 0.36-2.36 |
| 4 1 0 | 0.76 | 0.30-1.95 |
| 4 0 2 | 0.91 | 0.35-2.34 |
| 4 0 1 | 0.75 | 0.29-1.93 |
| 4 0 0 | 0.60 | 0.23-1.54 |
| 3 4 0 | 1.01 | 0.39-2.60 |
| 3 3 1 | 1.00 | 0.39-2.57 |
| 3 3 0 | 0.85 | 0.33-2.18 |
| 3 2 1 | 0.85 | 0.33-2.18 |
| 3 2 0 | 0.70 | 0.27-1.80 |
| 3 1 2 | 0.84 | 0.33-2.16 |
| 3 1 1 | 0.70 | 0.27-1.80 |
| 3 1 0 | 0.56 | 0.22-1.44 |
| 3 0 2 | 0.69 | 0.27-1.77 |
| 3 0 1 | 0.55 | 0.21-1.41 |
| 3 0 0 | 0.41 | 0.16-1.05 |
| 2 4 0 | 0.79 | 0.31-2.03 |
| 2 3 1 | 0.79 | 0.31-2.03 |
| 2 3 0 | 0.66 | 0.26-1.70 |
| 2 2 1 | 0.65 | 0.25-1.67 |
| 2 2 0 | 0.52 | 0.20-1.34 |
| 2 1 1 | 0.52 | 0.20-1.34 |
| 2 1 0 | 0.39 | 0.15-1.00 |
| 2 0 2 | 0.51 | 0.20-1.31 |
| 2 0 1 | 0.38 | 0.15-0.98 |
| 2 0 0 | 0.26 | 0.10-0.67 |
| 1 3 0 | 0.49 | 0.19-1.26 |
| 1 2 1 | 0.49 | 0.19-1.26 |
| 1 2 0 | 0.36 | 0.14-0.93 |
| 1 1 1 | 0.36 | 0.14-0.93 |
| 1 1 0 | 0.24 | 0.09-0.62 |
| 1 0 2 | 0.36 | 0.14-0.93 |
| 1 0 1 | 0.24 | 0.09-0.62 |
| 1 0 0 | 0.12 | 0.05-0.31 |
| 0 2 0 | 0.23 | 0.09-0.59 |
| 0 1 1 | 0.23 | 0.09-0.59 |
| 0 1 0 | 0.11 | 0.04-0.28 |
| 0 0 1 | 0.11 | 0.04-0.28 |

### Table 10: Protection in Mice.

[0300] The table shows the level of protection achieved after immunisation with Borrelia antigens against a challenge with B. burgdorferi s.s. strain N40. Borrelia infection of mice was determined with Western blot (WB) of post-challenge sera and cultivation of Borrelia from ear and bladder (C). The percentages of uninfected mice are listed in the table for the test antigens and the control groups in the respective animal experiment. nd: not determined.

TABLE 10

| | | | % Noninfected mice | | | | | |
|---|---|---|---|---|---|---|---|---|
| | | | Test | | | | | |
| Animal | | Protein | Protein | | PBS | | OspA | |
| Experiment | Challenge Dose | Construct | WB | C | WB | C | WB | C |
| 1 | nd | Bbu0210-1 | 50% | 50% | 20% | 20% | 100% | 100% |
| | | Bbu0210-2 | 40% | 40% | | | | |
| | | Baf0221 | 40% | 40% | | | | |
| | | Baf0237 | 30% | 30% | | | | |
| | | Baf0512-2 | 30% | 30% | | | | |
| | | Baf0627 | 30% | 30% | | | | |
| | | Bbu0680-2 | 30% | 30% | | | | |
| | | BbuA0034-1 | 60% | 60% | | | | |
| 2 | 18900 | BB0058-1 | nd | 10% | 0% | 0% | 70% | 70% |
| | | Baf0581 | nd | 10% | | | | |
| 3 | 16300 | BB0794-3 | nd | 10% | nd | 0% | nd | 60% |

### EXAMPLES

### Example 1

### General Screening Procedure for the Identification of the Peptides According to the Present Invention

[0301] The approach, which has been employed for the present invention, is based on the interaction of proteins or peptides encoded by B. burgdorferi s.l. with the antibodies present in human sera. The antibodies produced against B. burgdorferi s.l. by the human immune system and present in human sera are indicative of the in vivo expression of the antigenic proteins and their immunogenicity. In addition, the antigenic proteins as identified by the bacterial surface display expression libraries using pools of pre-selected sera, are processed in a second and third round of screening by individual selected or generated sera. Thus the present invention supplies an efficient, relevant, comprehensive set of antigens as a pharmaceutical composition, especially a vaccine preventing infections caused by B. burgdorferi s.l.

[0302] In the antigen identification program for identifying a comprehensive set of antigens according to the present invention, at least two different bacterial surface expression libraries from B. burgdorferi s.l. are screened with several serum pools or plasma fractions or other pooled antibody containing body fluids (antibody pools). The antibody pools are derived from a serum collection, which has been tested against antigenic compounds of B. burgdorferi s.l., such as whole cell, total extracts. Preferably, six pools of sera (with 25 individual samples) are used. Sera determined to have high ELISA titre have to react with multiple proteins in immunoblotting in order to be considered hyperimmune and therefore relevant in the screening method applied for the present invention.

[0303] The expression libraries as used in the present invention should allow expression of all potential antigens, e.g. derived from all secreted and surface proteins of B. burgdorferi s.l. Bacterial surface display libraries will be represented by a recombinant library of a bacterial host displaying a (total) set of expressed peptide sequences of B. burgdorferi s.l. on two selected outer membrane proteins (LamB and FhuA) at the bacterial host membrane (Georgiou, G., 1997; Etz, H. et al., 2001). One of the advantages of using recombinant expression libraries is that the identified hyperimmune serum-reactive antigens may be instantly produced by expression of the coding sequences of the screened and selected clones expressing the hyperimmune serum-reactive antigens without further recombinant DNA technology or cloning steps necessary.

[0304] The comprehensive set of antigens identified by the described program according to the present invention is analysed further by one or more additional rounds of screening. Therefore individual antibody preparations or antibodies generated against selected peptides, which were identified as immunogenic are used. According to a preferred embodiment the individual antibody preparations for the second round of screening are derived from healthy adults and/or challenged adults who show an antibody titre above a certain minimum level, for example an antibody titre being higher than 80 percentile, preferably higher than 90 percentile, especially higher than 95 percentile of the human (patient or healthy individual) sera tested. Using such high titre individual antibody preparations in the second screening round allows a very selective identification of the hyperimmune serum-reactive antigens and fragments thereof from B. burgdorferi s.l.

[0305] Following the comprehensive screening procedure, the selected antigenic proteins, expressed as recombinant proteins or in vitro translated products, in case it can not be expressed in prokaryotic expression systems, or the identified antigenic peptides (produced synthetically) are tested in a second screening by a series of ELISA and Western blotting assays for the assessment of their immunogenicity with a large human serum collection (minimum ˜20 healthy and patients sera).

[0306] It is important that the individual antibody preparations (which may also be the selected serum) allow a selective identification of the most promising candidates of all the hyperimmune serum-reactive antigens from all the promising candidates from the first round. Therefore, preferably at least 10 individual antibody preparations (i.e. antibody preparations (e.g. sera) from at least 10 different individuals suffered from an infection to the chosen pathogen) should be used in identifying these antigens in the second screening round. Of course, it is possible to use also less than 10 individual preparations, however, selectivity of the step may not be optimal with a low number of individual antibody preparations. On the other hand, if a given hyperimmune serum-reactive antigen (or an antigenic fragment thereof) is recognized by at least 10 individual antibody preparations, preferably at least 30, especially at least 50 individual antibody preparations, identification of the hyperimmune serum-reactive antigen is also selective enough for a proper identification. Hyperimmune serum-reactivity may of course be tested with as many individual preparations as possible (e.g. with more than 100 or even with more than 1,000).

[0307] Therefore, the relevant portion of the hyperimmune serum-reactive antibody preparations according to the method of the present invention should preferably be at least 10, more preferred at least 30, especially at least 50 individual antibody preparations. Alternatively (or in combination) hyperimmune serum-reactive antigens may preferably be also identified with at least 20%, preferably at least 30%, especially at least 40% of all individual antibody preparations used in the second screening round.

[0308] According to a preferred embodiment of the present invention, the sera from which the individual antibody preparations for the second round of screening are prepared (or which are used as antibody preparations), are selected by their titre against B. burgdorferi s.l. (e.g. against a preparation of these pathogens, such as a lysate, cell wall components and recombinant proteins). Preferably, some are selected with an IgG titre above 1,000 U, especially above 5,000 U (U=units, calculated from the OD405 nm reading at a given dilution) when the whole organism (total lysate or whole cells) is used as antigen in the ELISA.

[0309] The antibodies produced against B. burgdorferi s.l. by the human immune system and present in human sera are indicative of the in vivo expression of the antigenic proteins and their immunogenicity. The recognition of linear epitopes recognized by serum antibodies can be based on sequences as short as 4-5 amino acids. Of course it does not necessarily mean that these short peptides are capable of inducing the given antibody in vivo. For that reason the defined epitopes, polypeptides and proteins are further to be tested in animals (mainly in mice) for their capacity to induce antibodies against the selected proteins in vivo.

[0310] The preferred antigens are located on the cell surface or secreted, and are therefore accessible extracellularly. Antibodies against cell wall proteins are expected to serve multiple purposes: to inhibit adhesion, to interfere with nutrient acquisition, to inhibit immune evasion and to promote phagocytosis (Hornef, M. et al., 2002). Antibodies against secreted proteins are beneficial in neutralisation of their function as toxin or virulence component. It is also known that bacteria communicate with each other through secreted proteins. Neutralizing antibodies against these proteins will interrupt growth-promoting cross-talk between or within infection causing pathogen species. Bioinformatic analyses (signal sequences, cell wall localisation signals, transmembrane domains) proved to be very useful in assessing cell surface localisation or secretion. The experimental approach includes the isolation of antibodies with the corresponding epitopes and proteins from human serum, and the generation of immune sera in mice against (poly) peptides selected by the bacterial surface display screens. These sera are then used in a third round of screening as reagents in at least one of the following assays: cell surface staining of B. burgdorferi s.l. grown under different conditions (FACS or microscopy), determination of neutralizing capacity (toxin, adherence), and promotion of opsonization and phagocytosis (in vitro phagocytosis assay).

[0311] For that purpose, bacterial E. coli clones are directly injected into mice and immune sera are taken and tested in the relevant in vitro assay for functional opsonic or neutralizing antibodies. Alternatively, specific antibodies may be purified from human or mouse sera using peptides or proteins as substrate.

[0312] According to the antigen identification method used herein, the present invention can surprisingly provide a set of comprehensive novel nucleic acids and novel proteins, antigens and more specifically hyperimmune serum reactive antigens and fragments thereof of B. burgdorferi s.l., among other things, as described herein. The nucleotide sequences according to the present invention encoding hyperimmune serum reactive antigens have a nucleotide sequence which is individually set forth in Seq ID Nos 1-134, 269-387 and 507-628, whereby the corresponding encoded amino acid sequences have an amino acid sequence as set forth in Seq ID Nos 135-268, 388-506 and 629-750.

[0313] All linear hyperimmune serum reactive fragments of a particular antigen may be identified by analysing the entire sequence of the protein antigen by a set of peptides overlapping by 1 amino acid with a length of at least 10 amino acids. Subsequently, non-linear epitopes can be identified by analysis of the protein antigen with hyperimmune sera using the expressed full-length protein or domain polypeptides thereof. Assuming that a distinct domain of a protein is sufficient to form the 3D structure independent from the native protein, the analysis of the respective recombinant or synthetically produced domain polypeptide with hyperimmune serum would allow the identification of conformational epitopes within the individual domains of multi-domain proteins. For those antigens where a domain possesses linear as well as conformational epitopes, competition experiments with peptides corresponding to the linear epitopes may be used to confirm the presence of conformational epitopes.

### Example 2

### Characterization and Selection of Human Serum Sources Based on Anti-B. burgdorferi s.l Antibodies, Preparation of Antibody Screening Reagents

### Experimental Procedures

### Enzyme-Linked Immunosorbent Assay (ELISA).

[0314] ELISA plates (Maxisorb, Millipore) were coated with 5-10 μg/ml total protein diluted in coating buffer (0.1 M sodium carbonate pH 9.2). For whole cell ELISA, 10⁶ biotin-labelled and fixed bacteria were added to Streptavidin-coated ELISA plates. Two dilutions of sera (10,000×, 50,000×) were made in PBS-BSA. Highly specific Horse Radish Peroxidase (HRP)-conjugated anti-human IgG secondary antibodies (Southern Biotech) were used according to the manufacturer's recommendations (dilution: 1,000×). Antigen-antibody complexes were quantified by measuring the conversion of the substrate (ABTS) to coloured product based on OD₄₀₅ₙₘ readings by automatic ELISA reader (TECAN SUNRISE).

### Preparation of Bacterial Antigen Extracts.

[0315] Total bacterial lysate: The B. burgdorferi s.s. strain B31 and B. afzelii strain VS461 were grown for 1 week in BSI-II medium (37° C., 5% CO₂) and collected by centrifugation (3,000 rpm, 10 min, 4° C.). Cells were washed twice with PBS, and after re-suspension sonicated for 2 min, pulse 5, 100% power on ice. The supernatant was collected by centrifugation (3,500 rpm, 15 min, 4° C.). Protein concentration was measured with the Bradford assay using protein assay dye reagent concentrate (Bio-Rad Laboratories, Austria).

### Immunoblotting

[0316] Total bacterial lysates were prepared from in vitro grown B. burgdorferi s.s. strain B31 and B. afzelii strain VS461. 10 to 25 μg total protein/lane was separated by SDS-PAGE using the BioRad Mini-Protean Cell electrophoresis system and proteins transferred to nitrocellulose membrane (ECL, Amersham Pharmacia). After overnight blocking in 5% milk, human sera were added at 2,000× dilution, and HRP labelled anti-human IgG was used for detection.

### Purification of Antibodies for Genomic Screening

[0317] Five sera per antibody pool were selected based on the overall anti-bacterial titers for serum used in the screening procedure. Antibodies against E. coli DH5alpha proteins were removed by incubating the heat-inactivated sera with whole cell E. coli DH5alpha cells (transformed with pHIE11, grown under the same condition as used for bacterial surface display). Highly enriched preparations of IgGs from the pooled, depleted sera were generated by protein G affinity chromatography, according to the manufacturer's instructions (UltraLink Immobilized Protein G, Pierce). The efficiency of depletion and purification was checked by ELISA measurements.

### Results

[0318] The antibodies produced against B. burgdorferi s.l. by the human immune system and present in human sera are indicative of the in vivo expression of the antigenic proteins and their immunogenicity. These molecules are essential for the identification of individual antigens in the approach as described in the present invention, which is based on the interaction of the specific anti-bacterial antibodies and the corresponding B. burgdorferi s.l. peptides or proteins. To gain access to relevant antibody repertoires, human sera were collected from individuals with different Lyme borreliosis symptoms and healthy exposed people. It is important to screen with antibodies from Lyme borreliosis patient with different disease manifestations, since the different B. burgdorferi s.l. genospecies causing Lyme borreliosis give rise to different disease symptoms. A distinct set of sera with 1325 samples was collected from Lyme borreliosis patients in Austria and the Czech Republic.

[0319] 1325 serum samples were collected and characterized for anti-B. burgdorferi s.l. antibodies by a series of immune assays. Primary characterization was done by ELISA using total bacterial lysate for B. burgdorferi s.s. and B. garinii. Antibody titers were measured and ELISA units calculated from serum dilutions in the linear range of response. Sera were ranked based on the antibody reactivity and the highest ones were selected for further testing by immunoblotting. This analysis confirmed a high antibody reactivity of the pre-selected sera against multiple B. burgdorferi s.l. proteins. The reactivities of the sera used for screening against bacterial lysates from B. burgdorferi s.s. are shown in FIG. 1A. The final selection of sera to be included in antibody-pools was based mainly on the presence of multiple immunogenic bands in immunoblotting experiments, representative Western blots are shown in FIGS. 1B and C. This extensive antibody characterization approach has led to the unambiguous identification of anti-B. burgdorferi s.l. hyperimmune sera.

[0320] Selected sera were included in 6 different IgG pools (3-5 sera in each pool) for antigen identification by bacterial surface display. IgG antibodies were purified from pooled sera by affinity chromatography and depleted of E. coli DH5alpha-reactive antibodies to avoid background in the bacterial surface display screens. The serum pools are representing Erythema migrans EM-IgG (P3055, P3144, P3186 and P3219), Neuroborreliosis NB-IgG (P3077, P3084, P3286, P3288 and P3337), Acrodermitis Chronica Atrophicans ACA-IgG (P3183, P3209 and P3336), Lyme arthritis LA-IgG (P3120, P3239 and P3251) and two pools generated with sera from patients with mixed symptoms LBI-IgG (P1755, P1766, P1772, P1806 and P1811) and LBII-IgG (P3016, P3150, P3301, P3344 and P3394).

### Example 3

### Generation of Highly Random, Frame-Selected, Small-Fragment, Genomic DNA Libraries of B. Burgdorferi s.l.

### Experimental Procedures

### Preparation of Genomic DNA.

[0321] Cells from a 400 ml bacterial culture were harvested (5,000 rpm, 20 min, room temperature), washed with 80 ml 50 mM Tris pH 7.4 and re-suspended in 10 ml 50 mM Tris pH 7.4/25% Sucrose/50 mM EDTA. The suspension was transferred to a fresh glass tube and Lysozyme (final conc.: 1.5 mg/ml) and SDS (final conc.: 2%) were added. The tube was incubated on ice for cell lysis. Proteinase K (final conc.: 0.1 mg/ml) was added and incubated for 10 min at 37° C., followed by Phenol/Chloroform (1:1) extraction, which was performed several times. A final extraction step was performed with Chloroform/Isoamylalcohol (1:24) to remove Phenol traces. The sample was treated with RNase A (final conc.: 10 μg/ml) for 1 h at room temperature and Phenol/Chloroform and Chloroform/Isoamylalcohol extractions were performed as described above. DNA in the remaining supernatant was precipitated by addition of 1/10th of the starting volume of 3 M NaAc (pH 5.3) and 2.5× of the volume of 99.5% Ethanol. After 1 h incubation at −20° C., the mixture was centrifuged (20,000 rpm, 15 min) and the pellet washed with 70% Ethanol. Finally, the pellet was dissolved in TE-Buffer.

### Preparation of Small Genomic DNA Fragments.

[0322] Genomic DNA fragments were mechanically sheared into fragments ranging in size between 150 and 300 bp using a cup-horn sonicator (Bandelin Sonoplus UV 2200 sonicator equipped with a BB5 cup horn, 10 sec. pulses at 100% power output) or into fragments of size between 50 and 70 bp mild DNase I treatment (Novagen). It was observed that sonication yielded a much tighter fragment size distribution when breaking the DNA into fragments of the 150-300 bp size range. However, despite extensive exposure of the DNA to ultrasonic wave-induced hydromechanical shearing force, subsequent decrease in fragment size could not be efficiently and reproducibly achieved. Therefore, fragments of 50 to 70 bp in size were obtained by mild DNase I treatment using Novagen's shotgun cleavage kit. A 1:20 dilution of DNase I provided with the kit was prepared and the digestion was performed in the presence of MnCl₂ in a 60 μl volume at 20° C. for 5 min to ensure double-stranded cleavage by the enzyme. Reactions were stopped with 2 μl of 0.5 M EDTA and the fragmentation efficiency was evaluated on a 2% TAE-agarose gel. This treatment resulted in total fragmentation of genomic DNA into near 50-70 bp fragments. Fragments were then blunt-ended twice using T4 DNA Polymerase in the presence of 100 μM each of dNTPs to ensure efficient flushing of the ends. Fragments were used immediately in ligation reactions or frozen at −20° C. for subsequent use.

### Description of the Vectors.

[0323] The vector pMAL4.31 was constructed on a pASK-IBA backbone (Skerra, A., 1994) with the beta-lactamase (bla) gene exchanged with the Kanamycin resistance gene. In addition the bla gene was cloned into the multiple cloning site. The sequence encoding mature beta-lactamase is preceded by the leader peptide sequence of ompA to allow efficient secretion across the cytoplasmic membrane. Furthermore a sequence encoding the first 12 amino acids (spacer sequence) of mature beta-lactamase follows the ompA leader peptide sequence to avoid fusion of sequences immediately after the leader peptidase cleavage site, since e.g. clusters of positive charged amino acids in this region would decrease or abolish translocation across the cytoplasmic membrane (Kajava, A. et al., 2000). A SmaI restriction site serves for library insertion. An upstream FseI site and a downstream NotI site, which were used for recovery of the selected fragment, flank the SmaI site. The three restriction sites are inserted after the sequence encoding the 12 amino acid spacer sequence in such a way that the bla gene is transcribed in the −1 reading frame resulting in a stop codon 15 bp after the NotI site. A +1 bp insertion restores the bla ORF so that beta-lactamase protein is produced with a consequent gain of Ampicillin resistance.

[0324] The vector pMAL9.1 was constructed by cloning the lamB gene into the multiple cloning site of pEH1 (Hashemzadeh-Bonehi, L. et al., 1998). Subsequently, a sequence was inserted in lamB after amino acid 154, containing the restriction sites FseI, SmaI and NotI. The reading frame for this insertion was constructed in such a way that transfer of frame-selected DNA fragments excised by digestion with FseI and NotI from plasmid pMAL4.31 yields a continuous reading frame of lamB and the respective insert.

[0325] The vector pHIE11 was constructed by cloning the fhuA gene into the multiple cloning site of pEH1. Thereafter, a sequence was inserted in fhuA after amino acid 405, containing the restriction site FseI, XbaI and NotI. The reading frame for this insertion was chosen in a way that transfer of frame-selected DNA fragments excised by digestion with FseI and NotI from plasmid pMAL4.31 yields a continuous reading frame of fhuA and the respective insert.

### Cloning and Evaluation of the Library for Frame Selection.

[0326] Genomic B. burgdorferi s.l. DNA fragments were ligated into the SmaI site of the vector pMAL4.31. Recombinant DNA was electroporated into DH10B electrocompetent E. coli cells (GIBCO BRL) and transformants plated on LB-agar supplemented with Kanamycin (50 μg/ml) and Ampicillin (50 μg/ml). Plates were incubated over night at 37° C. and colonies collected for large scale DNA extraction. A representative plate was stored and saved for collecting colonies for colony PCR analysis and large-scale sequencing. A simple colony PCR assay was used to initially determine the rough fragment size distribution as well as insertion efficiency. From sequencing data the precise fragment size was evaluated, junction intactness at the insertion site as well as the frame selection accuracy (3n+1 rule).

### Cloning and Evaluation of the Library for Bacterial Surface Display.

[0327] Genomic DNA fragments were excised from the pMAL4.31 vector, containing the B. burgdorferi s.l. library with the restriction enzymes FseI and Nod. The entire population of fragments was then transferred into plasmids pMAL9.1 (LamB) or pHIE11 (FhuA), which have been digested with FseI and NotI. Using these two restriction enzymes, which recognise an 8 bp GC rich sequence, the reading frame that was selected in the pMAL4.31 vector is maintained in each of the platform vectors. The plasmid library was then transformed into E. coli DH5alpha cells by electroporation. Cells were plated onto large LB-agar plates supplemented with 50 μg/ml Kanamycin and grown over night at 37° C. at a density yielding clearly visible single colonies. Cells were then scraped off the surface of these plates, washed with fresh LB medium and stored in aliquots for library screening at −80° C.

### Results

### Libraries for Frame Selection.

[0328] Two libraries were generated for B. afzelii strain K78 in the pMAL4.31 vector with sizes of approximately 70 and 300 bp, respectively. For each library, ligation and subsequent transformation of approximately 1 μg of pMAL4.31 plasmid DNA and 50 ng of fragmented genomic B. afzelii DNA yielded 8×10⁴ to 2×10⁵ clones after frame selection. To assess the randomness of the libraries, approximately 500 to 600 randomly chosen clones of each library were sequenced. The representative bioinformatic analysis of two libraries (LBA-50 and LBA-300) showed that of clones corresponding to these libraries only very few were present more than once. Furthermore, it was shown for the LBA-50 library that the average insert size was 51 bp, very close to the expected insert size (FIG. 2A). Regarding the LBA-300 library, the average insert size was 170 bp slightly shorter than the expected insert size (FIG. 2B).

### Bacterial Surface Display Libraries.

[0329] The display of peptides on the surface of E. coli required the transfer of the inserts from the LBA-50 and the LBA-300 libraries from the frame selection vector pMAL4.31 to the display plasmids pMAL9.1 (LamB) or pHIE11 (FhuA). Genomic DNA fragments were excised by FseI and NotI restriction and ligation of 5 ng inserts with 0.1 μg plasmid DNA and subsequent transformation into DH5alpha cells resulted in 2×10⁵ to 5×10⁵ clones. The clones were scraped off the LB plates and frozen without further amplification.

### Example 4

### Identification of Highly Immunogenic Peptide Sequences from B. burgdorferi s.l. Using Bacterial Surface Displayed Genomic Libraries and Human Serum

### Experimental Procedures

### MACS Screening.

[0330] Approximately 2.5×10⁸ cells from a given library were grown in 5 ml LB-medium supplemented with 50 μg/ml Kanamycin for 2 h at 37° C. Expression was induced by the addition of 1 mM IPTG for 30 min. Cells were washed twice with fresh LB medium and approximately 2×10⁷ cells re-suspended in 100 μl LB medium and transferred to an Eppendorf tube.

[0331] 10 to 20 μg of biotinylated, human IgGs purified from serum was added to the cells and the suspension incubated overnight at 4° C. with gentle shaking. 900 μl of LB medium was added, the suspension mixed and subsequently centrifuged for 10 min at 6,000 rpm at 4° C. Cells were washed once with 1 ml LB and then re-suspended in 100 μl LB medium. 10 μl of MACS microbeads coupled to streptavidin (Miltenyi Biotech, Germany) were added and the incubation continued for 20 min at 4° C. Thereafter 900 μl of LB medium was added and the MACS microbead cell suspension was loaded onto the equilibrated MS column (Miltenyi Biotech, Germany) which was fixed to the magnet. (The MS columns were equilibrated by washing once with 1 ml 70% EtOH and twice with 2 ml LB medium.)

[0332] The column was then washed three times with 3 ml LB medium. After removal of the magnet, cells were eluted by washing with 2 ml LB medium. After washing the column with 3 ml LB medium, the 2 ml eluate was loaded a second time on the same column and the washing and elution process repeated. The loading, washing and elution process was performed a third time, resulting in a final eluate of 2 ml.

[0333] Cells selected after two rounds of selection were plated onto LB-agar plates supplemented with 50 μg/ml Kanamycin and grown over night at 37° C.

### Evaluation of Selected Clones by Sequencing and Western Blot Analysis.

[0334] Randomly selected clones were grown overnight at 37° C. in 3 ml LB medium supplemented with 50 μg/ml Kanamycin to prepare plasmid DNA using standard procedures. Sequencing was performed at MWG (Germany).

[0335] For Western blot analysis approximately 10 to 20 μg of total cellular protein was separated by 10% SDS-PAGE and blotted onto HybondC membrane (Amersham Pharmacia Biotech, England). The LamB or FhuA fusion proteins were detected using human serum as the primary antibody at a dilution of approximately 1:3,000 to 1:5,000 and anti-human IgG antibodies coupled to HRP at a dilution of 1:5,000 as secondary antibodies. Detection was performed using the ECL detection kit (Amersham Pharmacia Biotech, England). Alternatively, rabbit anti-FhuA or rabbit anti-LamB polyclonal immune sera were used as primary antibodies in combination with the respective secondary antibodies coupled to HRP for the detection of the fusion proteins.

### Results

### Screening of Bacterial Surface Display Libraries by Magnetic Activated Cell Sorting (MACS) Using Biotinylated Igs.

[0336] The libraries K78-LamB in pMAL9.1 and K78-FhuA in pHIE11 were screened with pools of biotinylated, human IgGs prepared from sera of Lyme borreliosis patients (P1755, P1766, P1772, P1806, P1811, P3055, P3144, P3186, P3219, P3077, P3084, P3286, P3288, P3337, P3016, P3150, P3301, P3344, P3394, P3183, P3209, P3336, P3120, P3239, P3251) (see Example 1: Preparation of Antibodies from Human Serum). The Selection Procedure was Performed as described under Experimental procedures. FIG. 3A shows a representative example of a screen with the K78-FhuA library and EM-IgGs. As can be seen from the colony count after the first selection cycle from MACS screening, the total number of cells recovered at the end is drastically reduced from 1×10⁷ cells to approximately 3×10⁴ cells, and the selection without antibodies showed a more pronounced reduction in cell numbers, showing that selection was dependent on B. burgdorferi s.l. specific antibodies (FIG. 3A). To evaluate the performance of the screen, 20 selected clones were picked randomly and subjected to immunoblot analysis with the screening EM-IgG pool (FIG. 3B). This analysis revealed that a majority of selected clones showed reactivity with antibodies present in the relevant serum whereas the control strain expressing FhuA without a B. afzelii specific insert did not react with the same serum. In general, the rate of reactivity was observed to lie within the range of 40 to 70%. Colony PCR analysis showed that all selected clones contained an insert in the expected size range.

[0337] Similar results were seen in screens with libraries from the other serum pools. As a second example, FIGS. 3C and D show the data obtained with the large insert K78-FhuA and the LA-IgG antibody pool. One round of MACS selection resulted in the enrichment of cells only in the presence, but not the absence of specific IgG (FIG. 3C), indicating that the selection was specific for the applied antibodies. The specific selection was then confirmed in the Western blot analysis of individual bacterial clones with the same LA-IgG antibody pool (FIG. 3D).

[0338] Subsequent sequencing of a larger number of randomly picked clones (600 to 800) from each screen led to the identification of the gene and the corresponding peptide or protein sequence that was specifically recognized by the human serum antibodies used for screening. The frequency with which a specific clone is selected reflects at least in part the abundance and/or affinity of the specific antibodies in the serum used for selection and recognizing the epitope presented by this clone. In that regard it is striking that clones derived from some ORFs (e.g. BAP001 and BAP024) were picked more than 100 times, indicating their highly immunogenic property. Table 1 summarizes the data obtained for all 12 performed screens. All clones that are presented in Table 1 have been verified by immunoblot analysis using whole cellular extracts from single clones to show the indicated reactivity with the pool of human serum used in the respective screen. As can be seen from Table 1, distinct regions of the identified ORF are identified as immunogenic, since variably sized fragments of the proteins are displayed on the surface by the platform proteins. Since the genomic sequence of B. afzelii was not available at the time of the performance of the screens, all BLAST analyses with epitopes derived from the B. afzelii screens, have been first performed with the genomic sequence from B. burgdorferi s.s. and later with the genomic sequence from B. garinii. Table 1 displays the B. afzelii ORF names derived from a preliminary annotation of the B. afzelii K78 genome, plasmid derived ORFs are chronologically numbered.

[0339] It is further worth noticing that many of the genes identified by the bacterial surface display screens encode proteins that are attached to the surface of the bacterium. This is in accordance with the expected role of surface attached proteins in virulence of B. burgdorferi s.l.

### Example 5

### Gene Distribution Studies with Highly Immunogenic Proteins Identified from B. afzelii K78

### Experimental Procedures

### Gene Distribution of Antigens by PCR.

[0340] An ideal vaccine antigen would be an antigen that is present in all, or the vast majority of strains of the target organism to which the vaccine is directed. In order to establish whether the genes encoding the identified B. afzelii K78 antigens occur ubiquitously in the relevant strains, PCR was performed on a series of independent bacterial isolates with primers specific for the gene of interest. B. burgdorferi s.l. isolates were obtained covering the ospC types most frequently present in patients as shown in Table 3. Oligonucleotide sequences as primers were designed for all identified ORFs yielding products of approximately 1,000 bp, if possible covering all identified immunogenic epitopes. Genomic DNA of all B. burgdorferi s.l. strains was prepared as described under Example 2. PCR was performed in a reaction volume of 25 μl using Taq polymerase (1 U), 200 nM dNTPs, 10 pMol of each oligonucleotide and the kit according to the manufacturer's instructions (Invitrogen, The Netherlands). As standard, 30 cycles (1×: 5 min. 95° C., 30×: 30 sec. 95° C., 30 sec. 56° C., 30 sec. 72° C., 1×4 min. 72° C.) were performed, unless conditions had to be adapted for individual primer pairs.

### Results

[0341] Identified genes encoding immunogenic proteins were tested by PCR for their presence in 30 different B. burgdorferi s.l. strains (Table 3). As an example, FIG. 4 shows the PCR reaction for the B. afzelii BAP004 antigen with all indicated 30 strains. As clearly visible, the gene is present in all strains analysed. All results with the selected antigens are summarized in Table 4. Importantly, some of the identified antigens are well conserved in all strains of the respective pathogen in sequence and size and are therefore novel vaccine candidates to prevent infections by B. burgdorferi s.l.

### Example 6

### Immunogenicity of Immune Sera Obtained from Mice Immunized with Highly Immunogenic Proteins/Peptides from B. burgdorferi s.l. Displayed on the Surface of E. coli

### Experimental Procedures

[0342] Generation of Immune Sera from Mice.

[0343] E. coli clones harbouring plasmids encoding the platform protein fused to a B. afzelii K78 peptide, were grown in LB medium supplemented with 50 μg/ml Kanamycin at 37° C. Overnight cultures were diluted 1:10, grown until an OD₆₀₀ of 0.5 and induced with 0.2 mM IPTG for 2 hours. Pelleted bacterial cells were suspended in PBS buffer and disrupted by sonication on ice, generating a crude cell extract. According to the OD₆₀₀ measurement, an aliquot corresponding to 5×10⁷ cells was injected into NMRI mice i.v., followed by a boost after 2 weeks. Serum was taken 1 week after the second injection. Epitope specific antibody levels were measured by peptide ELISA.

### Results

### Immunogenicity in Mice.

[0344] The presence of specific antibodies was determined by peptide ELISA as it is exemplified in FIG. 5, and summarized in Table 5. Ninety-nine antigens from B. burgdorferi s.l. represented by 109 different epitope regions were shown to be immunogenic in mice. These experiments confirmed the bioinformatic prediction that many of the identified epitopes/proteins are immunogenic not only in humans, but also in experimental animals.

### Example 7

### Validation of Peptides from B. afzelii K78 by Peptide ELISA

### Enzyme-Linked Immunosorbent Assay (ELISA).

[0345] ELISA plates (Maxisorb, Millipore) were coated with 5-10 μg/ml total protein diluted in coating buffer (0.1 M sodium carbonate pH 9.2). Two dilutions of sera (400×, 2,000×) were made in PBS-BSA. Highly specific Horse Radish Peroxidase (HRP)-conjugated anti-human IgG secondary antibodies (Southern Biotech) were used according to the manufacturer's recommendations (dilution: 1,000×). Antigen-antibody complexes were quantified by measuring the conversion of the substrate (ABTS) to coloured product based on OD₄₀₅ₙₘ readings by automatic ELISA reader (TECAN SUNRISE). The measurements at 400× dilution were used for the calculation of the results as displayed in Table 6.

### Results

### Immunogenicity in Humans.

[0346] The presence of specific antibodies in human sera was determined by peptide ELISA as summarized in Table 6. The human sera used for this analysis correspond to those that were included in the various serum pools applied for the identification of antigens by the bacterial surface display screens. Single or multiple peptides from individual antigens from B. afzelii K78 were analysed and many of these were shown to be immunogenic in humans. It is evident that some of the selected peptides are highly reactive with many or all of the investigated human sera (e.g. BAOba0565.02 or BAOba0077.01), while others showed intermediate reactivities. For those antigens for which the selected epitope encompassed more than 30 amino acids, multiple peptides were designed with an overlap of 5 to 6 amino acids. For some of the antigens, it was observed that these multiple peptides from the same antigen showed different reactivities, further delineating the immunogenic region of the respective antigen (e.g. BA0314 or BA0546). These experiments confirmed that many of the identified epitopes/proteins are highly immunogenic in humans, indicating that they are expressed by the pathogen during infection and capable of inducing a strong immune response.

### Example 8

### Surface Binding to B. burgdorferi s.l. of Immune Sera Obtained from Mice Immunized with Highly Immunogenic Proteins/Peptides from B. afzelii K78 Displayed on the Surface of E. coli

### Experimental Procedures

### FACS Analysis.

[0347] The B. afzelii strain K78 was cultivated at 34° C.; the number of spirochetes was determined by dark-field microscopy and spirochetes were diluted with fresh BSK medium to a concentration of 10⁶ organisms per millilitre. Each mouse sera were diluted 1:25 with fresh BSK medium (100 μl) and heat inactivated for 30 min at 56° C. 100 μl of mouse sera is added to 100 μl (10⁵ cells) of the Borrelia suspension (sera finally 1:50 diluted). The assay suspension is gently mixed and incubated at room temperature for 1 hour. After incubation, the samples were centrifuged at 5,000 rpm for 3 min, and washed once with 1 ml PBS, 0.5% BSA. Secondary staining was done with PE conjugated anti-mouse antibody which were used according to the manufacturer's recommendations (diluted in 100 μl). Secondary staining was performed on ice for 45 min. At the end of the incubation, the samples are centrifuged at 5,000 rpm for 3 min, washed with 1 ml PBS 0.5% BSA and resuspended in 1 ml of PBS-1% paraformaldehyde. Samples were vortexed and analysed by flow cytometry.

### Results

[0348] Surface binding to B. burgdorferi s.l. cells.

[0349] The presence of antibodies recognising surface proteins on B. afzelii K78 were tested in FACS analysis. Thirty-two antigens represented by 40 different sera showed a significant shift in the FACS analysis compared to the buffer control (Table 7). This in vitro experiment indicates that in in vitro cultured B. burgdorferi s.l. cells 32 antigens are expressed on the surface.

### Example 9

### Recombinant Borrelia Antigens Induce Protective Immune Response Against a Needle Challenge of Borrelia burgdorferi Sensu Stricto

### Experimental Procedures

### Cloning and Expression of Recombinant Borrelia Proteins

### Cloning of Genes:

[0350] The gene of interest was amplified using specific primers from genomic DNA isolated from the B. afzelii K78 by PCR. Apart from the gene specific part, the primers had restriction sites that aided in a directional cloning of the amplified PCR product. The gene annealing (specific) part of the primer ranged between 15-30 bases in length. The PCR products obtained were digested with the appropriate restriction enzymes and cloned into the pET28b (+) vector (Novagen) for His-tagged proteins. The constructs of the selected antigens are listed in Table 8. Once the recombinant plasmid was confirmed to contain the gene of interest, E. coli BL21 CodonPlus (DE3)-RIPL cells (Invitrogen) that served as expression host were transformed.

### Expression and Purification of Proteins:

[0351] E. coli BL21 CodonPlus (DE3)-RIPL cells harboring the recombinant plasmid were grown into log phase in the required culture volume. Once an OD600 nm of 0.6 was reached the culture was induced with 0.5 mM IPTG for 3 hours at 37° C. The cells were harvested by centrifugation, lysed by a combination of the freeze-thaw method followed by disruption of cells with Bug-buster® (Novagen). The lysate was separated by centrifugation into soluble (supernatant) and insoluble (pellet) fractions. Depending on the location of the protein different purification strategies were applied:
[0352] A) If the His-tagged protein was in the soluble fraction, protein purification was done by binding the supernatant to Ni-Sepharose beads (Ni-Sepharose™ 6 Fast Flow, GE Healthcare). Due to the presence of the hexa Histidine (6×HIS) at the C terminus of the expressed protein, it bound to the Ni-Sepharose while the other contaminating proteins were washed from the column by wash buffer. The protein was eluted by 500 mM Imidazole in 20 mM NaH₂PO₄, 0.5 mM NaCl buffer at pH 7.4. The eluate was concentrated, assayed by Bradford for protein concentration and checked by SDS-PAGE and Western blot.
[0353] B) If the protein was present in the insoluble fraction the pellet was solubilized in suitable buffer containing 8 M Urea and applied onto the Ni-NTA column under denaturing conditions (in buffer containing 8 M Urea) using the same materials and procedure as mentioned above. Contaminating proteins were washed from the column by wash buffer without urea. Refolding of the His-tagged protein was performed while the protein was immobilized on the Ni-NTA matrix. After renaturation, proteins were eluted by the addition of 500 mM Imidazole. The eluate was dialysed to remove traces of urea and concentrated if the volume was large, checked by SDS-PAGE and measured by the Bradford method.

### Animal Protection Studies

### Animals:

[0354] C3H/HeN female mice (6-8 weeks) were used.

[0355] Active immunisation, generation of hyper-immune mouse sera: 50 μg of recombinant proteins were injected subcutaneously into female C3H/HeN mice, with Complete Freund adjuvant (CFA) as adjuvant. Animals were boosted twice with the same amount of protein and Incomplete Freund adjuvant (IFA) at days 14 and 28. The published protective OspA protein antigen was used as a positive control, immunisation with adjuvant alone in PBS buffer served as negative control (PBS). Antibody titres were measured at day 35 by ELISA using the respective recombinant proteins.

### Bacterial Challenge:

[0356] The Borrelia burgdorferi s.s. strain N40 freshly grown in BSK-II medium was used as challenge strain. In order to determine the viable cell numbers present in the bacterial inoculum, a cloning with limited dilution was performed. Eight aliquots of 2 ml BSK-II with theoretically either 10, 1.0 or 0.1 cells/aliquot were incubated at 34° C. and 5% CO₂, after three weeks aliquots were evaluated for the presence of live Borrelia cells by dark-field microscopy. With the result from the cloning with limited dilution the most probable number of Borrelia cells in the first dilution was taken from Table 9. 10⁴ cells were applied subcutaneous into mice. Protection by immunisation was determined by cultivation of Borrelia cells from ear and bladder in BSK-II medium and by sero-conversion as determined with Western blot (FIG. 6). Protection was expressed in percentage of the total number of uninfected animals (10 mice/group).

### Western Blot:

[0357] PAGE 4-20% Tris-glycine ZOOM Gels 1 mm×IPG well (Invitrogen) were used according to the instruction manual. Borrelia lysates (25 μg/sample) were mixed with 5× reducing sample buffer and heated for 10 min at 95° C. PageRuler™ prestained protein ladder plus (MW 10-250 kDa; Fermentas, Germany) served as indicator for protein size. Proteins were separated with 160 V for approximately 70 minutes and gels were further used for Western blotting. Proteins separated by one dimensional gel electrophoresis were transferred onto a nitrocellulose membrane (Hybond™ 0.45 Micron, Amersham Bioscience, England) using a semi-dry transfer system (Trans-Blot® SD; BioRad, U.S.A.). Gel and membrane were assembled in a blot sandwich and blotted in Transfer buffer at 80 mA for 1 h at room temperature. Blotted proteins were visualized by Ponceau S (Sigma, Austria) staining. Non-specific binding sites were blocked by incubating membranes in 5% milk-PBS-T for one hour at room temperature. Membranes were washed three times for 15 min with PBS-T solution and subsequently incubated with first antibody solution (individual mouse sera diluted 1:1,000 with 5% milk-PBS-T) for one hour at room temperature. The membranes were washed as described above and subsequently incubated with secondary antibody solution (rabbit anti-mouse IgG-HRP from Jackson Immuno Research Laboratory Inc., U.S.A.; 1:5,000 diluted with 5% milk-PBS-T) for one hour at room temperature. Prior to detection, membranes were washed three times for 15 min with PBS-T. Signals were visualized using an ECL detection kit (Amersham Pharmacia Biotech, England).

Cultivation of Borrelia from Mouse Organs:

[0358] Organs (ear and bladder) were aseptically taken from the mouse and transferred to tubes with 10 ml BSK-II medium supplemented with 400 μg/ml phosphomycin and 50 μg/ml sulfamethoxazole. The cultures were incubated for a maximum of four weeks at 34° C., 5% CO₂. Cultures were examined with dark-field microscopy for the presence of living Borrelia cells.

### Results

[0359] After having established the Borrelia animal model with the virulent B. burgdorferi s.s. strain N40, the protective capabilities of the in vitro selected vaccine candidates were evaluated. Mice were immunized with recombinant antigens (Table 8) using CFA/IFA as adjuvant before challenging with the B. burgdorferi s.s. strain N40. Four weeks after the challenge sera for the determination of sero-conversion by Western blot analyses (FIG. 6) and organs for detection of live Borrelia by cultivation in BSK-II medium were taken. The correlation between sero-conversion and cultivation of Borrelia from mouse organs was 100%. Several antigens with various levels of protection were identified (Table 10) in the animal studies. The percentage of uninfected mice was compared to the negative control group, mice immunized with adjuvant alone in PBS buffer (PBS). Protective antigens are defined as those where immunisation resulted in at least one more uninfected mouse than in the PBS control group.

[0360] The observed protection of the vaccine candidates can be described as cross-protection, because the sequence of the antigens was derived from a Borrelia burgdorferi sensu lato genospecies distinct from the challenge strain. The antigens were cloned from the B. afzelii strain K78 and the challenge strain used in the animal studies was the B. burgdorferi s.s. strain N40. Therefore, higher protection levels would be expected against a challenge strain with the same genospecies, B. afzelii, as the origin of the amino acid sequence of the tested vaccine candidates.

### REFERENCES

[0361] The following references which have been recited in the present specification in a truncated version are incorporated herein by reference in their entirety.
[0362] Altschul, S., et al. (1990). Journal of Molecular Biology 215: 403-10.
[0363] Bennett, D., et al. (1995). J Mol Recognit 8: 52-8.
[0364] Burgdorfer, W., et al. (1982). Science 216: 1317-1319.
[0365] Casjens, S., et. al. (2000). Mol. Mirobiol. 35: 490-516.
[0366] Clackson, T., et al. (1991). Nature 352: 624-8.
[0367] Current Protocols in Molecular Biology, John Wiley and Sons, Inc. (1987).
[0368] Devereux, J., et al. (1984). Nucleic acids research 12: 387-95.
[0369] Doherty, E., et al. (2001). Annu Rev Biophys Biomol Struct 30: 457-475.
[0370] Eisenbraun, M., et al. (1993). DNA Cell Biol 12: 791-7.
[0371] Etz, H., et al. (2001). J Bacteriol 183: 6924-35.
[0372] Fraser, C., et al. (1997). Nature 390: 580-586.
[0373] Ganz, T. (1999). Science 286: 420-421.
[0374] Georgiou, G. (1997). Nature Biotechnology 15: 29-34.
[0375] Glöckner, G., et al, (2004). Nucleic acids research 32: 6038-6046.
[0376] Hashemzadeh-Bonehi, L., et al. (1998). Mol Microbiol 30: 676-678.
[0377] Heinje, von G. (1987). Sequence Analysis in Molecular Biology, Academic Press.
[0378] Hemmer, B., et al. (1999). Nat Med 5: 1375-82.
[0379] Hornet M., et al. (2002). Nat Immunol 3: 1033-40.
[0380] Johanson, K., et al. (1995). J Biol Chem 270: 9459-71.
[0381] Jones, P., et al. (1986). Nature 321: 522-5.
[0382] Kajava, A., et al. (2000). J Bacteriol 182: 2163-9.
[0383] Kohler, G., et al. (1975). Nature 256: 495-7.
[0384] Kolaskar, A., et al. (1990). FEBS Lett 276: 172-4.
[0385] Lewin, A., et al. (2001). Trends Mol Med 7: 221-8.
[0386] Livey I. et al. (1995). Mol Microbiol. 18: 257-69.
[0387] Lyme Disease Surveillance (2004). MMWR 53: 365-369.
[0388] Marks, J., et al. (1992). Biotechnology (N Y) 10: 779-83.
[0389] McCafferty, J., et al. (1990). Nature 348: 552-4.
[0390] Norman, R. L. and Kempe, L. L. (1960). J. Biochem. Microbiol. Technol. Engng. 2: 157-163.
[0391] Okano, H., et al. (1991). J Neurochem 56: 560-7.
[0392] Oligodeoxynucleotides as Antisense Inhibitors of Gene Expression; CRC Press, Boca Raton, Fla. (1988).
[0393] Rammensee, H., et al. (1999). Immunogenetics 50: 213-9.
[0394] Report of WHO workshop on Lyme borreliosis and Diagnosis and surveillance (1995). WHO/CDS/VPH/95 141.
[0395] Seeger, C., et al. (1984). Proc Natl Acad Sci USA 81: 5849-52.
[0396] Skerra, A. (1994). Gene 151: 131-5.
[0397] Steere, A. C., et al. (1977). Arthritis Rheum. 20: 7-17.
[0398] Steere, A. C. (1989). New England Journal of Medicine 321: 586-596.
[0399] Surveillance of Lyme borreliosis in Germany, 2002 and 2003 (2005). Euro Surveill. 10: 83-85.
[0400] Tang, D., et al. (1992). Nature 356: 152-4.
[0401] Tempest, P., et al. (1991). Biotechnology (N Y) 9: 266-71.
[0402] Tourdot, S., et al. (2000). Eur J Immunol 30: 3411-21.
[0403] Wilske B. et al. (1988). Ann N Y Acad Sci. 539: 126-43.
[0404] Xu, Y., et al. (1995). J. Clin. Microbiol. 33: 2679-2685.

[0405] The features of the present invention disclosed in the specification, the claims and/or the drawings may both separately and in any combination thereof be material for realizing the invention in various forms thereof.

1. An isolated nucleic acid molecule encoding a protein, comprising a nucleic acid sequence, which is selected from the group consisting of:
a) a nucleic acid molecule having at least 70% sequence identity to a nucleic acid molecule having a nucleotide sequence selected from the group consisting of Seq ID Nos 1 to 134, 269 to 387, and 507 to 628,
b) a nucleic acid molecule which is complementary to the nucleic acid molecule of a),
c) a nucleic acid molecule comprising at least 15 sequential bases of the nucleic acid molecule of a) or b),
d) a nucleic acid molecule which anneals under stringent hybridisation conditions to the nucleic acid molecule of a), b), or c), and
e) a nucleic acid molecule which, but for the degeneracy of the genetic code, would hybridize to the nucleic acid molecule defined in a), b), c) or d),
wherein the protein is a hyperimmune serum reactive antigen, or a fragment thereof, if the nucleic acid sequence is selected from the group consisting of Seq ID Nos 269 to 387 and 507 to 628.

2. (canceled)

3. The isolated nucleic acid molecule according to claim 1, wherein the sequence identity is at least 70%.

4. (canceled)

5. (canceled)

6. An isolated nucleic acid molecule according to claim 1, wherein the nucleic acid molecule is isolated from a genomic DNA, preferably from a species selected from the group comprising Borrelia burgdorferi s.s., Borrelia garinii, Borrelia afzelii, Borrelia andersonii, Borrelia bissettii, Borrelia valaisiana, Borrelia lusitaniae, Borrelia spielmani, Borrelia japonica, Borrelia tanukii, Borrelia turdae and Borrelia sinica, and more preferably from Borrelia burgdorferi s.s., Borrelia afzelii or Borrelia garinii.

7. (canceled)

8. The nucleic acid according to claim 1, wherein the protein is or consists of an antigen from Borrelia burgdorferi s.s., Borrelia garinii, Borrelia afzelii, Borrelia andersonii, Borrelia bissettii, Borrelia valaisiana, Borrelia lusitaniae, Borrelia spielmani, Borrelia japonica, Borrelia tanukii, Borrelia turdae or Borrelia sinica, preferably from Borrelia burgdorferi s.s., Borrelia afzelii or Borrelia garinii.

9. A vector comprising a nucleic acid molecule according to claim 1.

10. (canceled)

11. A host cell comprising the vector as defined in claim 9.

12. (canceled)

13. A protein, having an amino acid sequence selected from the group consisting of Seq ID Nos 135 to 268, 388 to 506, and 629 to 750, or an active fragment or an active variant thereof, wherein the protein is a hyperimmune serum reactive antigen, or a fragment thereof, if the amino acid sequence is selected from the group consisting of Seq ID Nos. 388 to 506 and 629 to 750.

14. (canceled)

15. The protein according to claim 13, wherein the protein is encoded by a nucleic acid molecule as defined in claim 1.

16. (canceled)

17. (canceled)

18. The protein according to claim 13, wherein the active fragment thereof consists of at least 60%, as defined in of claim 13.

19. The protein according to claim 13, wherein the active variant thereof has at least 50% sequence identity to said hyperimmune serum reactive antigen or protein as defined in claim 13.

20. An antigen, whereby the antigen comprises a core amino acid sequence as indicated in column “Predicted immunogenic aa” and “Location of identified immunogenic region” of Table 1, as indicated in column “aa (start-stop)” of Table 5, as defined by columns “From aa” and “To aa” of Table 6, or as defined by column “Amino acid From-To” of Table 8 or, such antigen comprises a core amino acid sequence selected from the group consisting of: amino acids 6-20, 25-51, 58-83, 94-105, 111-122, 127-135, 141-155, 162-173, 179-186, 188-207, 213-226, 230-248, 253-265, 269-282, 285-291, 367-378, 384-393, 401-425, 453-464, 471-477, 504-514, 519-527, 532-555, 557-572, 584-598, 609-616, 624-630, 638-645, 648-653, 128-169, 257-336, 339-379 and 91-415 of Seq ID No 135; amino acids 23-31, 47-53, 57-64, 74-89, 91-106, 127-132, 137-144, 152-157, 164-169, 186-192, 201-206, 208-217, 223-235 and 180-189 of Seq ID No 136; amino acids 4-32, 43-52, 54-66, 78-88, 91-122, 124-131, 144-150, 153-159, 161-178, 183-191, 195-201, 205-215, 236-252, 258-263, 276-284, 288-294, 302-312 and 159-213 of Seq ID No 137; amino acids 8-23, 30-35, 44-54, 65-73, 77-83, 89-110, 117-129, 132-137, 156-165, 169-175, 189-199, 225-237 and 229-267 of Seq ID No 138; amino acids 5-31, 40-50, 52-58, 64-72, 112-118, 137-142, 170-175, 179-185, 192-201, 299-305 and 138-187 of Seq ID No 139; amino acids 11-18, 23-47, 113-119, 131-137, 143-149, 197-203, 215-222, 247-256, 264-290, 298-303, 311-358, 368-401, 403-409 and 97-177 of Seq ID No 140; amino acids 5-20, 27-32, 34-40, 43-64, 66-72, 78-85, 91-97, 104-110, 118-141 and 94-119 of Seq ID No 141; amino acids 5-22, 25-32, 39-45, 51-58, 60-104, 106-114, 129-155, 160-166, 174-182, 195-204, 207-213, 223-239, 243-250, 257-267, 270-276, 279-285, 293-302, 304-317, 328-335, 360-372, 374-382, 386-397, 404-418, 429-438, 441-447, 450-460, 467-472, 480-497, 501-507, 515-521, 562-572 and 195-228 of Seq ID No 142; amino acids 4-10, 31-42, 44-59, 65-72, 75-115, 119-127, 146-155, 181-188, 198-207, 213-219, 228-244, 254-264, 269-293, 295-310, 313-321, 323-336, 350-369, 380-389 and 165-214 of Seq ID No 143; amino acids 11-25, 27-45, 66-73, 75-85, 104-113, 126-135, 143-154, 160-166, 178-185, 201-215, 231-245, 254-261, 266-296, 298-306, 308-332, 339-344, 360-370, 385-391, 412-419, 449-457, 461-469, 472-478, 495-505, 511-518 and 350-451 of Seq ID No 144; amino acids 14-35, 64-72, 81-87, 90-99, 110-116, 137-152, 158-166, 171-178, 207-216, 225-232, 239-250, 264-271, 276-286, 316-323, 325-343, 350-356, 393-407, 416-422, 440-445, 448-453, 469-475, 497-506, 509-529, 537-543, 586-592, 603-610, 41-107 and 528-596 of Seq ID No 145; amino acids 56-62, 83-96, 161-167, 170-179, 184-197, 205-214, 235-243, 285-296, 302-308, 324-333 and 18-315 of Seq ID No 146; amino acids 4-11, 35-41, 57-65, 82-88, 99-115, 118-124, 126-134, 146-151, 159-167, 174-180, 187-192, 195-206, 216-222, 237-247, 261-269, 295-304, 327-334, 341-347, 363-374, 382-388, 398-404, 410-424, 430-436, 441-448, 451-461, 473-484, 493-507, 509-522, 528-536, 544-550, 566-573, 588-604, 608-614, 22-75, 110-148 and 344-404 of Seq ID No 147; amino acids 4-14, 21-28, 32-38, 59-71, 84-106, 110-120, 127-140, 146-167, 184-190, 197-203, 223-232, 249-278, 280-292, 309-324, 342-355, 367-374, 377-384 and 264-328 of Seq ID No 148; amino acids 13-18, 47-55, 65-75, 132-138, 140-146, 149-155, 157-168, 218-227, 241-248, 275-281, 283-289, 306-315, 329-336, 352-360, 372-378, 388-394, 396-404, 411-416, 424-429, 445-455, 479-491, 494-500, 571-578, 583-588, 600-621, 6-65, 68-112, 261-352 and 449-507 of Seq ID No 149; amino acids 10-34, 36-42, 46-55, 58-64, 79-86, 99-122, 125-135, 165-184, 200-209, 215-226, 232-238 and 79-89 of Seq ID No 150; amino acids 4-34, 38-62, 64-78, 87-99, 101-109, 113-125, 128-156, 166-184, 186-193, 196-203, 205-215, 220-226, 236-260, 262-269, 271-288, 296-302, 325-333, 339-350 and 111-138 of Seq ID No 151; amino acids 8-23, 25-33, 57-68, 102-113, 194-199, 236-241, 269-296, 326-333, 339-348, 352-360, 364-369, 378-393, 422-430, 434-447, 476-484, 488-501, 530-538, 542-555, 585-592, 596-609, 638-646, 650-663, 692-699, 706-716, 726-745, 765-771, 792-798, 809-815, 825-835, 862-868, 878-885, 893-902, 911-922, 927-937, 947-953, 962-970, 978-985, 1011-1017, 1027-1034, 1045-1052, 102-177, 285-364, 937-983, 27-246 and 701-1067 of Seq ID No 152; amino acids 4-20, 36-45, 62-69, 73-83, 95-112, 153-166, 178-185, 194-205, 215-223, 238-247 and 80-159 of Seq ID No 153; amino acids 82-95, 107-122, 153-158, 165-171, 178-196, 202-210, 216-222, 270-280, 312-318, 336-341, 381-389 and 245-299 of Seq ID No 154; amino acids 4-23, 45-57, 68-81, 91-104, 118-131, 134-144, 160-166, 172-189, 191-202, 204-217, 228-236, 261-268, 273-285, 287-294, 307-316, 328-343, 350-356, 381-418, 420-429, 440-452, 458-465, 497-504, 528-538, 546-556, 567-574, 580-601, 605-624, 628-639, 647-653 and 126-200 of Seq ID No 155; amino acids 4-19, 24-30, 32-48, 53-80, 89-97, 102-109, 136-142, 145-153, 156-164, 177-187, 192-209, 215-221, 238-243, 15-146 and 21-257 of Seq ID No 156; amino acids 5-13, 70-79, 91-97, 123-129, 155-162, 173-189, 199-224, 232-238, 255-261, 265-283, 290-301, 306-311, 314-320, 336-344, 351-358, 395-409, 412-418, 430-439, 35-109 and 187-298 of Seq ID No 157; amino acids 13-31, 36-47, 80-96, 98-107, 144-149, 187-193, 215-220, 235-251, 291-300, 306-326, 328-338, 340-358, 364-380, 408-426, 434-441 and 220-288 of Seq ID No 158; amino acids 4-24, 36-43, 70-81, 89-100, 109-120, 127-132, 141-158, 165-178, 183-191, 193-202, 208-215 and 31-89 of Seq ID No 159; amino acids 6-25, 44-49, 95-105, 136-144, 199-215, 236-241, 256-262, 280-287, 306-320, 326-334, 346-354, 364-376, 83-172 and 272-327 of Seq ID No 160; amino acids 4-21, 27-44, 85-92, 100-107, 112-118, 142-149, 161-190, 216-222, 231-238, 258-310, 317-323, 334-344, 352-359, 367-373, 380-387, 394-400, 429-441, 485-500, 20-79 and 404-526 of Seq ID No 161; amino acids 12-28, 38-58, 61-75, 98-116, 121-127, 133-142, 169-199, 213-221, 236-241, 243-250, 254-260, 269-281, 284-301, 313-319, 352-358, 362-368, 391-397, 436-448, 455-463, 485-496, 498-511, 523-533, 40-97, 251-297 and 420-488 of Seq ID No 162; amino acids 8-15, 24-41, 50-79, 86-91, 109-141, 143-156, 166-171, 204-212, 235-243, 245-267, 291-311, 328-336, 344-360, 377-388, 390-396 and 258-336 of Seq ID No 163; amino acids 4-15, 22-38, 46-53, 72-82, 99-119, 131-139, 148-154, 179-184, 187-195, 203-209, 212-219, 223-231, 242-249, 257-263, 269-277, 282-288, 310-315, 346-353, 371-377, 388-395, 400-421, 427-438, 445-451 and 458-472 of Seq ID No 164; amino acids 5-29, 37-117, 128-134, 138-144, 146-161, 172-178, 193-219, 221-231, 234-240, 242-261, 263-274, 297-302, 306-322, 339-345, 356-365, 371-383, 402-413, 416-424, 432-443, 447-456, 461-466, 471-524, 532-593 and 197-284 of Seq ID No 165; amino acids 5-29, 54-69, 72-88, 99-112, 128-138, 150-165, 167-174, 181-187, 205-226, 246-253, 273-279, 285-291, 293-311, 313-323, 329-334, 338-350, 356-363, 366-372, 388-394, 397-404, 417-423, 437-445, 453-473 and 378-461 of Seq ID No 166; amino acids 38-45, 67-82, 90-96, 101-108, 113-120, 128-143, 160-173, 190-200, 206-218, 226-237, 244-252, 256-271, 276-285, 298-309, 319-325, 332-350, 355-363, 379-388, 395-404, 412-419, 427-433, 442-455, 82-127 and 212-253 of Seq ID No 167; amino acids 10-28, 37-50, 58-66, 72-91, 101-119, 124-131, 133-149, 152-170, 177-186, 198-204, 225-244, 249-256, 260-266, 269-286, 298-303, 306-312, 329-338, 342-348 and 26-73 of Seq ID No 168; amino acids 10-18, 45-51, 58-87, 95-139, 175-182, 184-194, 228-237, 239-245, 255-261, 269-282, 289-295, 301-308, 310-319, 333-374, 376-383, 394-447, 455-464, 485-503, 519-526, 532-542, 551-557, 571-604, 608-614, 616-623, 654-660, 682-687, 717-724, 729-736, 759-775, 800-806, 817-823, 829-838, 840-864, 877-887, 900-906, 943-951, 959-978, 981-994, 996-1012, 1016-1032, 1035-1046, 1049-1056, 1078-1109, 1117-1124, 1137-1143, 1158-1167, 1179-1199, 1201-1207, 1215-1245, 1250-1256, 1262-1268, 1270-1281, 1298-1310, 1314-1323, 1326-1333, 1347-1357, 1364-1372 and 1053-1082 of Seq ID No 169; amino acids 4-9, 15-27, 29-37, 50-59, 65-73, 94-107, 138-168, 179-187, 191-203, 230-237, 254-260, 267-274, 279-294, 312-328, 355-361, 368-375, 378-388, 405-415, 441-457, 459-467, 469-476, 496-506, 508-514, 521-531, 538-549, 554-561, 566-574, 582-591, 604-625, 640-653, 657-671, 674-689, 698-705, 713-723, 746-756, 763-771, 777-789, 801-809, 822-839, 847-854, 865-872, 877-883, 889-906, 922-940, 943-953, 963-984, 1004-1010, 1021-1037, 1045-1057, 1070-1089, 1096-1115, 1117-1123, 1127-1135 and 194-292 of Seq ID No 170; amino acids 10-30, 38-51, 74-81, 86-96, 116-148, 161-167, 202-208, 211-217, 239-261, 283-295, 298-310, 322-328, 335-346 and 44-99 of Seq ID No 171; amino acids 9-23, 31-42, 50-60, 68-74, 85-92, 98-106, 108-117, 135-142, 144-150, 155-172, 174-191, 193-206, 208-215, 223-233, 237-245, 252-267, 274-296, 308-316, 324-341, 375-385, 394-402, 419-440, 446-452, 493-499, 514-520, 537-546, 570-579, 582-588, 591-603, 609-618, 620-628, 640-687, 700-706, 714-742, 765-774, 794-805, 809-825, 827-838, 847-857, 860-867, 875-888, 897-907, 917-926, 937-942, 950-971, 975-981, 989-999, 1016-1052, 1054-1071, 1089-1105, 1108-1130, 1142-1160, 1166-1178, 1184-1197, 1199-1207, 1216-1222, 1232-1247, 1249-1254, 1262-1283, 1291-1300, 1308-1332, 1343-1356, 1363-1368, 1384-1398, 1401-1410, 1423-1434, 1443-1464, 1478-1484 and 1229-1275 of Seq ID No 172; amino acids 5-15, 21-35, 42-51, 55-60, 73-80, 87-94, 103-110, 134-146, 157-168, 174-188, 190-201, 209-223, 250-257, 110-131 and 179-236 of Seq ID No 173; amino acids 10-24, 30-48, 52-66, 90-100, 111-137, 153-162, 166-175, 184-190, 193-206, 226-232, 238-248, 250-260, 267-273, 322-333, 349-382, 402-413, 421-428, 443-451, 470-480, 487-498, 508-518, 526-539, 544-549, 568-574, 607-623, 631-636 and 372-434 of Seq ID No 174; amino acids 20-28, 33-38, 45-77, 91-110, 124-130, 137-162, 164-170, 175-183, 185-205, 207-217, 235-240, 254-269, 291-296, 319-326, 342-354, 374-381, 397-403, 424-434, 442-455, 469-484, 494-501, 513-522, 529-534, 546-556, 558-564 and 439-464 of Seq ID No 175; amino acids 4-13, 15-21, 24-32, 40-45, 47-65, 75-110, 114-123, 133-142, 144-159, 164-171, 187-215 and 12-77 of Seq ID No 176; amino acids 4-9, 25-44, 49-60, 72-82, 87-105, 125-138, 142-155, 171-179, 183-197, 205-225, 232-244, 256-270, 278-285, 287-293, 310-333, 339-345, 350-366, 368-378, 381-392, 397-404, 408-418 and 281-316 of Seq ID No 177; amino acids 28-35, 95-116, 138-146, 150-158, 174-203 and 33-78 of Seq ID No 178; amino acids 4-23, 31-43, 58-64, 68-83, 93-103, 121-135, 143-156, 181-187, 227-238, 251-264, 292-298, 309-317, 326-333, 351-357, 359-365, 387-395, 400-407, 431-437, 451-460, 462-471, 496-508, 519-526, 534-540, 568-573, 608-618, 620-627, 650-657, 673-679, 690-702, 705-714, 728-734, 738-745, 758-764, 776-782, 795-810, 830-839, 882-904, 911-926, 938-944, 962-969, 975-984, 999-1007, 1019-1025, 1072-1090, 1099-1111, 1172-1178, 1232-1241, 1245-1252, 1257-1266, 1283-1288, 1305-1311, 1370-1377, 1392-1398, 1412-1417, 1422-1434, 1448-1458, 1479-1487, 1529-1534, 1570-1576, 1582-1590, 1615-1622, 1630-1645, 1659-1668, 1700-1708, 1730-1736, 1756-1762, 1765-1776, 1798-1803, 1805-1819, 1831-1837, 1872-1882, 1926-1936, 1946-1952, 1955-1961, 1968-1980, 1995-2002, 2035-2045, 2048-2056, 2076-2083, 2099-2107, 2122-2128, 2146-2156, 718-788 and 399-870 of Seq ID No 179; amino acids 12-19, 22-29, 37-43, 48-56, 79-90, 114-119, 136-147, 162-172, 174-180, 186-194, 200-213, 232-238, 275-282, 288-297, 303-319, 329-338, 341-351, 363-371, 383-397, 416-423, 430-438, 454-472, 476-483, 536-542, 576-581, 626-632, 66-161 and 494-576 of Seq ID No 180; amino acids 29-35, 48-56, 82-89, 106-112, 118-126, 144-149, 157-173, 175-184 and 1-52 of Seq ID No 181; amino acids 14-36, 48-54, 79-85, 149-159, 171-182, 189-205, 211-217 and 171-240 of Seq ID No 182; amino acids 9-23, 30-40, 56-70, 75-80, 97-103, 111-117, 130-135, 139-145, 149-160, 250-256, 276-286, 309-315, 326-331, 364-376, 385-391, 400-412, 429-434, 446-462, 472-498 and 363-430 of Seq ID No 183; amino acids 4-28, 44-60, 73-81, 88-94, 102-108, 119-127, 145-170, 201-208, 220-227, 229-239, 291-297, 306-323, 327-335, 342-369, 372-394, 414-420, 427-445, 456-462, 471-478, 494-503, 505-510, 536-542, 549-567, 585-594, 614-627 and 215-283 of Seq ID No 184; amino acids 4-10, 27-33, 40-48, 64-70, 82-96, 108-115, 123-131, 171-176, 182-204 and 151-160 of Seq ID No 185; amino acids 4-15, 19-36, 39-47, 51-57, 62-69, 77-84, 91-97, 103-112, 117-136, 148-168, 189-195, 204-211, 213-228, 234-243, 268-274, 280-289, 294-308, 314-335, 341-349, 354-375, 382-392, 394-405, 419-424, 430-435, 442-469, 479-489, 500-507, 510-516, 523-534, 536-545, 560-579, 586-592, 614-620, 639-649, 652-663, 665-702, 704-710, 727-732, 743-755, 761-781, 799-805, 810-816, 842-851, 885-891, 904-912, 924-931, 933-946, 948-973, 980-988, 990-1007, 1017-1023, 1027-1035, 1046-1055, 1063-1074, 1086-1091, 1095-1102, 1116-1122, 1149-1158 and 458-497 of Seq ID No 186; amino acids 4-23, 26-32, 50-56, 72-85, 87-104, 106-113, 116-151, 159-174, 176-184, 187-194, 199-206, 211-232, 242-261, 91-170 and 22-264 of Seq ID No 187; amino acids 4-24, 53-58, 65-72, 84-96, 106-113, 115-125, 149-154, 176-191, 215-222, 239-244, 267-275, 278-304, 323-340, 345-351, 416-424, 449-455, 473-483, 523-537, 540-556, 564-583, 605-616, 36-119 and 343-394 of Seq ID No 188; amino acids 11-27, 45-52, 60-74, 96-102, 123-136, 140-155, 167-189, 194-201, 209-230, 254-261, 264-284, 289-294, 297-305, 319-325, 338-343, 349-361, 363-377, 381-388, 396-409, 413-422, 435-441, 455-469 and 342-386 of Seq ID No 189; amino acids 9-45, 47-54, 72-78, 81-96, 111-118, 123-130, 133-143, 148-154, 157-182, 202-215, 241-255, 290-311, 316-334, 340-346, 349-356, 366-385, 387-400, 403-411 and 156-286 of Seq ID No 190; amino acids 26-45, 62-70, 84-121, 129-138, 146-168, 182-188, 197-207, 213-220, 222-229, 246-257, 277-283, 304-314, 328-336, 348-371, 375-385, 388-396, 409-421, 429-438, 451-459, 465-485, 501-528, 530-536, 555-581, 589-594, 607-614, 620-626, 628-634, 637-643, 650-658, 665-671, 680-691, 703-709, 721-742, 746-758, 761-767, 772-777, 784-790, 796-810 and 747-795 of Seq ID No 191; amino acids 4-11, 15-37, 52-66, 79-90, 96-106, 110-118, 124-137, 152-160, 162-171, 174-182, 200-209, 215-222, 227-242, 248-264, 284-308, 325-340, 362-369, 390-418, 420-426, 440-454, 463-471, 478-485, 490-512, 517-532, 539-545, 570-583, 591-605, 621-630, 643-652, 655-665, 684-694, 75-223 and 285-348 of Seq ID No 192; amino acids 8-18, 25-57, 93-107, 121-128, 135-141, 159-176, 183-191, 202-223, 229-236, 298-304, 332-340, 359-368, 384-393, 410-426, 434-439, 444-449, 476-491, 502-508, 511-523, 525-533, 548-554 and 390-409 of Seq ID No 193; amino acids 13-31, 35-41, 50-58, 70-81, 91-100, 120-128, 143-149, 185-191, 196-203, 213-239, 241-251, 256-277, 289-303, 305-316, 364-388, 394-403, 406-412, 417-426, 440-446, 462-469, 494-502, 504-522 and 6-100 of Seq ID No 194; amino acids 7-14, 30-36, 43-52, 54-65, 71-85, 95-101, 113-119, 121-127, 153-170, 179-188, 191-200, 204-210, 214-222, 227-233, 244-250 and 168-223 of Seq ID No 195; amino acids 14-21, 25-39, 54-64, 74-99, 102-129, 139-153, 159-166, 188-206, 214-220, 236-243, 245-255, 262-269, 276-295, 300-309, 315-321, 324-331 and 12-84 of Seq ID No 196; amino acids 4-13, 26-33, 35-49, 55-68, 74-82, 96-114, 116-148, 150-161, 229-235, 237-254, 257-266, 280-286, 305-312, 320-337, 343-356, 373-382, 384-427, 433-439 and 50-64 of Seq ID No 197; amino acids 4-46, 53-78, 103-113, 117-122, 144-149, 168-174, 176-183, 193-200, 207-238, 252-259, 271-277, 279-307, 315-326, 330-391, 412-423, 425-464, 472-478, 508-526, 531-542, 551-560, 562-576, 584-593, 602-608, 616-637, 658-666, 714-719, 721-730, 28-73, 292-344, 531-608 and 391-753 of Seq ID No 198; amino acids 4-21, 26-33, 69-78, 80-93, 109-125, 127-134, 137-146, 154-160, 162-169, 173-182, 189-199, 210-220, 224-242, 246-278, 284-290, 294-308 and 223-272 of Seq ID No 199; amino acids 10-30, 33-42, 46-62, 64-70, 82-97, 112-122, 124-130, 138-145, 148-165, 167-178, 186-192, 196-209, 213-218, 241-249, 258-276, 279-288, 291-299, 302-307, 315-337, 344-349, 360-376, 390-402, 409-415, 417-428, 452-468, 475-484, 486-492 and 180-232 of Seq ID No 200; amino acids 17-24, 32-43, 49-55, 62-69, 78-92, 97-118, 132-139, 148-154, 173-179, 181-189, 191-210 and 117-131 of Seq ID No 201; amino acids 4-18, 35-44, 54-67, 77-85, 92-101, 106-119, 131-144, 146-164, 171-177, 182-191, 203-218, 282-288, 297-310, 343-359, 361-367, 400-405, 433-439, 454-462, 483-492, 496-504, 506-517, 522-529, 552-559, 564-572, 574-580, 590-604, 625-660 and 252-396 of Seq ID No 202; amino acids 33-50, 67-75, 89-95, 107-116, 119-126, 151-158, 165-170, 175-187, 237-243, 252-258, 272-282, 323-332 and 115-166 of Seq ID No 203; amino acids 14-23, 41-53, 63-107, 111-134, 136-155, 179-210, 223-233, 261-267, 285-290, 296-302 and 203-299 of Seq ID No 204; amino acids 22-31, 35-41, 53-62, 64-75, 79-90 and 1-22 of Seq ID No 205; amino acids 4-14, 17-30, 33-44, 54-62, 67-76, 78-97, 112-118, 143-152, 163-169, 175-188, 191-199, 207-216, 232-239, 243-249, 262-268, 289-296, 312-319, 335-340, 1-35 and 183-264 of Seq ID No 206; amino acids 5-18, 37-53, 56-66, 74-81, 100-110, 120-131, 135-141, 150-156, 174-181, 189-196, 202-211, 225-235, 246-251, 255-260, 311-319, 326-332 and 245-332 of Seq ID No 207; amino acids 4-25, 28-34, 41-49, 71-78, 101-120, 125-156, 167-173, 190-199, 207-213, 218-230, 256-267, 269-275, 286-304, 312-320, 341-349, 363-371, 375-384 and 318-384 of Seq ID No 208; amino acids 23-39, 48-58, 60-82, 85-104, 106-112, 117-142, 181-191, 205-213, 219-236, 242-251, 263-276, 295-302, 308-315, 320-330, 335-343, 363-372, 387-392, 413-419, 430-457, 462-470, 477-492, 499-505, 531-540, 542-548, 568-600, 607-614, 620-630 and 36-419 of Seq ID No 209; amino acids 9-50, 60-68, 70-78, 84-100, 105-113, 125-133, 141-153, 186-202, 204-209, 212-219, 236-253, 287-301, 310-317, 319-327, 332-342, 353-358, 364-396, 422-430, 437-459, 484-508, 510-520, 535-543, 573-583, 591-598, 610-621, 629-640, 648-653, 675-685, 691-708, 728-735, 738-745, 750-763, 765-773, 790-797, 799-820, 842-854, 857-864, 880-885, 903-909, 923-933, 939-951, 980-986, 991-998, 1019-1024, 1026-1033, 1045-1051, 1064-1075, 1077-1094, 1100-1115, 1139-1157, 1163-1181, 1196-1202, 1207-1213, 1219-1225, 1241-1250, 1275-1290, 1304-1310, 1332-1347, 1352-1365, 1383-1405, 1421-1429, 1433-1442, 1372-1419 and 979-1467 of Seq ID No 210; amino acids 4-40, 60-65, 90-102, 125-138, 150-160, 162-172 and 14-104 of Seq ID No 211; amino acids 4-31, 37-53, 59-80, 87-93, 173-183, 185-195, 219-233, 239-247, 265-275 and 72-146 of Seq ID No 212; amino acids 5-22, 38-46, 53-58, 69-78, 80-88, 92-99, 117-124, 142-151, 154-165, 189-196, 206-213, 220-226, 288-309, 15-106 and 137-201 of Seq ID No 213; amino acids 4-17, 37-47, 58-66, 75-81, 83-89, 106-116, 145-152, 162-168 and 41-155 of Seq ID No 214; amino acids 4-16, 50-57, 66-72, 92-100, 102-112, 126-150, 156-167, 194-204, 208-218, 244-256 and 165-200 of Seq ID No 215; amino acids 19-26, 38-51, 81-89, 96-103, 107-114, 117-122, 128-134, 150-158, 164-170 and 26-48 of Seq ID No 216; amino acids 5-24, 30-35, 42-47, 74-86, 107-117, 146-156 and 15-92 of Seq ID No 217; amino acids 5-22, 41-49, 55-65, 85-96, 100-106, 111-117, 125-132, 150-155, 161-189, 204-212, 229-243, 262-277, 286-296, 304-311, 314-323, 353-359, 367-373, 391-397, 410-417, 446-451, 485-500, 335-381, 422-484 and 251-528 of Seq ID No 218; amino acids 4-28, 37-43, 65-72, 109-127, 140-148, 155-166, 188-198 and 50-215 of Seq ID No 219; 4-24, 41-55, 71-79, 84-89, 95-100, 113-125, 138-148, 193-203, 215-221, 300-306, 334-350, 362-369, 385-396 and 91-213 of Seq ID No 220; amino acids 4-24, 94-101, 103-112, 128-134, 141-148, 156-165, 172-181, 191-197, 281-290 and 25-76 of Seq ID No 221; amino acids 5-13, 19-25, 27-40, 47-54, 63-69, 84-98, 119-125, 143-158, 170-182, 199-205, 223-234, 237-251, 257-265, 287-292, 296-301, 307-328, 336-352 and 336-362 of Seq ID No 222; amino acids 4-25, 29-36, 41-47, 54-66, 88-95, 97-110, 115-121, 127-135, 164-193, 203-220, 232-244, 269-275, 278-284, 289-316, 320-327, 336-342, 344-353, 355-363, 370-378, 436-442, 449-454, 460-466, 478-489, 492-505 and 311-377 of Seq ID No 223; amino acids 12-34, 40-48, 84-90, 131-138, 140-151, 157-175, 177-187, 193-201, 207-261, 267-281, 306-312, 334-340, 343-349, 352-357, 369-377, 380-394 and 331-386 of Seq ID No 224; amino acids 6-20, 54-73, 97-116, 129-135, 138-149, 173-191, 194-208 and 116-212 of Seq ID No 225; amino acids 11-34, 41-48, 58-72, 82-88, 90-99, 101-109, 137-145, 161-168, 172-188, 193-211, 215-221, 260-269, 271-278, 304-310, 317-327, 336-351 and 208-230 of Seq ID No 226; amino acids 4-13, 20-30, 73-83, 90-107, 117-137, 226-236, 244-260, 268-275, 286-293, 310-3-17, 324-330, 340-367, 370-379, 390-422, 427-442, 497-505, 507-513, 549-557, 569-576, 585-593, 611-617, 630-638, 647-657, 659-666, 670-675, 689-699, 726-736, 769-774, 779-802, 866-873, 886-894, 934-940, 956-973, 986-992, 1009-1017, 1026-1041, 1043-1050, 1056-1068, 3-48 and 576-739 of Seq ID No 227; amino acids 10-19, 32-40, 42-48, 50-58, 75-85, 88-97, 112-139 and 32-72 of Seq ID No 228; amino acids 4-13, 20-27, 67-80, 92-98, 101-107, 114-123, 153-169, 174-181, 200-206, 213-219, 226-242, 248-254, 256-289, 299-307, 310-316, 320-326, 329-346, 382-392 and 324-391 of Seq ID No 229; amino acids 32-38, 40-47, 49-54, 79-89, 95-101, 110-117, 122-129, 132-140, 151-157, 178-197, 200-206, 216-227, 249-257, 104-143 and 148-195 of Seq ID No 230; amino acids 10-16, 35-47, 52-77, 81-89, 104-109, 115-123, 132-149, 151-160, 163-184, 197-213, 215-245, 252-266, 294-304, 310-337, 342-348, 362-372, 393-398, 408-430, 452-466, 468-476, 485-491, 497-506, 514-520, 530-537, 539-557, 592-606, 627-632, 636-653, 674-688, 693-731, 748-753, 760-766, 783-797, 805-814, 819-825, 833-840, 843-851, 91-135, 282-299 and 445-477 of Seq ID No 231; amino acids 11-22, 25-31, 55-65, 83-107, 111-129 and 130-137 of Seq ID No 232; amino acids 15-21, 24-43, 60-68, 86-95, 157-185, 188-197 and 3-75 of Seq ID No 233; amino acids 13-19, 35-44, 56-73, 79-92, 116-129, 143-158, 169-178, 198-210, 215-221, 238-243, 247-256, 261-267, 270-294, 310-320, 331-341, 360-366, 377-387, 397-406, 412-421, 423-439, 449-455, 458-465, 473-479, 483-492, 510-525, 561-569, 571-597, 599-619, 635-641, 686-704, 712-721, 738-755, 761-767, 781-794, 806-813, 844-857, 862-873, 875-882, 889-896, 901-915, 921-931, 937-943, 963-975, 991-997, 1001-1009, 1025-1032, 1040-1046, 1051-1056, 1073-1080, 1096-1105, 1112-1154, 1163-1170, 1173-1180, 1186-1197, 1203-1208, 1224-1232, 1237-1249, 1254-1261, 400-429 and 521-545 of Seq ID No 234; amino acids 6-30, 81-87, 117-128, 134-142, 147-158, 178-186, 217-227, 246-255 and 61-122 of Seq ID No 235; amino acids 4-22, 31-38, 77-83, 130-137, 159-169, 188-194, 208-229, 231-238, 272-283, 286-294, 308-315, 317-336, 338-347, 8-232 and 265-318 of Seq ID No 236; amino acids 9-23, 26-34, 36-42, 73-94, 113-142, 186-192, 200-221, 232-238, 246-252, 254-279, 292-307, 311-316, 20-62 and 95-181 of Seq ID No 237; amino acids 26-37, 58-67, 83-89, 97-109, 114-141 and 1-76 of Seq ID No 238; amino acids 13-20, 28-35, 70-78, 95-102, 156-169, 171-180 and 121-178 of Seq ID No 239; amino acids 7-20, 32-41, 131-147, 156-166, 219-226, 240-251, 259-270, 275-282, 299-305, 309-315, 336-342, 344-350 and 195-259 of Seq ID No 240; amino acids 7-23, 37-44, 48-63, 93-102, 108-120, 138-145, 219-228, 237-246, 251-270, 277-283, 292-300, 317-323, 336-351, 361-367, 19-124 and 160-232 of Seq ID No 241; amino acids 28-35, 40-47, 93-100, 102-110, 158-182 and 4-77 of Seq ID No 242; amino acids 8-32, 39-44, 104-110, 157-169, 183-196, 212-217 and 42-199 of Seq ID No 243; amino acids 4-18, 49-56, 72-81, 90-107, 127-133, 146-151 and 48-114 of Seq ID No 244; amino acids 4-22, 24-30, 42-53, 57-62, 66-80, 83-90, 99-104, 112-118, 132-148, 168-175, 179-186 and 97-173 of Seq ID No 245; amino acids 7-19, 33-43, 58-77, 85-91 and 14-63 of Seq ID No 246; amino acids 15-21, 24-35, 75-80, 123-128, 133-139, 148-172 and 7-136 of Seq ID No 247; amino acids 29-35, 51-56, 64-74, 82-88, 100-106, 134-153 and 1-44 of Seq ID No 248; amino acids 32-44, 65-72, 75-103, 136-144, 159-166 and 136-185 of Seq ID No 249; amino acids 16-28, 40-53, 74-89, 108-114, 130-140, 152-160, 168-177 and 3-151 of Seq ID No 250; amino acids 5-27, 39-45, 57-65, 72-83, 130-135 and 27-91 of Seq ID No 251; amino acids 16-22, 31-44, 52-67, 79-84, 95-106, 119-127 and 22-78 of Seq ID No 252; amino acids 4-23, 32-39, 45-53, 67-75, 83-89, 97-112, 133-139, 189-194, 200-205, 241-247, 254-259, 275-282, 287-308, 311-316, 329-339, 344-352 and 157-246 of Seq ID No 253; amino acids 4-21, 24-30, 52-77, 81-88, 97-102, 110-115, 125-137 and 70-113 of Seq ID No 254; amino acids 4-20, 33-38, 44-56, 73-81, 123-135, 159-166, 169-181, 199-204 and 13-91 of Seq ID No 255; amino acids 12-18, 23-31, 39-52, 54-60, 63-74, 89-97, 99-111 and 1-66 of Seq ID No 256; amino acids 4-19, 55-62, 76-94, 96-104, 109-126 and 154-166 of Seq ID No 257; amino acids 4-11, 26-39 and 11-19 of Seq ID No 258; amino acids 4-21 and 15-24 of Seq ID No 259; amino acids 12-25 and 23-45 of Seq ID No 260; amino acids 4-23, 33-55, 59-64, 76-93, 107-125, 129-138 and 54-78 of Seq ID No 261; amino acids 4-27, 56-82 and 21-40 of Seq ID No 262; amino acids 8-17, 24-36, 47-61, 76-83 and 65-83 of Seq ID No 263; amino acids 4-22, 37-46, 54-60, 64-70 and 13-25 of Seq ID No 264; amino acids 9-17, 23-41, 64-86, 6-25 and 53-66 of Seq ID No 265; amino acids 4-23, 29-48 and 18-29 of Seq ID No 266; amino acids 9-20, 26-40, 44-51 and 40-60 of Seq ID No 267; amino acids 4-9, 11-18, 20-31 and 4-21 of Seq ID No 268; amino acids 257-278 of Seq ID No 135; amino acids 159-188 and 184-213 of Seq ID No 137; amino acids 230-251 and 247-267 of Seq ID No 138; amino acids 138-164 and 160-187 of Seq ID No 139; amino acids 97-120, 116-139, 135-158 and 154-177 of Seq ID No 140; amino acids 160-187 of Seq ID No 141; amino acids 165-192 and 188-214 of Seq ID No 143; amino acids 350-378 of Seq ID No 144; amino acids 62-86 and 82-106 of Seq ID No 145; amino acids 18-42, 38-62, 78-102, 98-122, 118-142, 138-165, 275-297, 293-315, 185-211, 207-233 and 229-255 of Seq ID No 146; amino acids 22-50, 46-75, 110-131, 127-148, 344-367, 361-384, 382-405 and 401-424 of Seq ID No 147; amino acids 304-328 of Seq ID No 148; amino acids 6-29, 68-92, 88-112, 449-471 and 485-507 of Seq ID No 149; amino acids 937-962, 958-983, 102-130 and 126-154 of Seq ID No 152; amino acids 80-103, 99-122, 118-141 and 137-159 of Seq ID No 153; amino acids 270-299 of Seq ID No 154; amino acids 126-153 and 172-200 of Seq ID No 155; amino acids 15-40, 36-61, 57-82, 78-103 and 99-124 of Seq ID No 156; amino acids 35-63 and 82-109 of Seq ID No 157; amino acids 298-327 of Seq ID No 160; amino acids 20-43, 39-62, 58-79, 354-377, 404-431, 427-453, 449-475, 471-498 and 494-521 of Seq ID No 161; amino acids 40-62, 58-80, 76-97, 251-276, 272-297, 291-316 and 333-358 of Seq ID No 162; amino acids 197-222, 239-264 and 260-284 of Seq ID No 165; amino acids 378-402 and 438-461 of Seq ID No 166; amino acids 82-107, 103-127, 212-235 and 231-253 of Seq ID No 167; amino acids 1053-1082 of Seq ID No 169; amino acids 270-292 of Seq ID No 170; amino acids 44-65, 61-82 and 78-99 of Seq ID No 171; amino acids 1230-1254 of Seq ID No 172; amino acids 110-131 of Seq ID No 173; amino acids 372-395 and 410-434 of Seq ID No 174; amino acids 439-464 of Seq ID No 175; amino acids 52-77 of Seq ID No 176; amino acids 281-300 and 296-316 of Seq ID No 177; amino acids 33-57 and 53-78 of Seq ID No 178; amino acids 718-744, 740-766 and 762-788 of Seq ID No 179; amino acids 66-93, 89-116, 112-139 and 135-161 of Seq ID No 180; amino acids 171-197 of Seq ID No 182; amino acids 102-127, 123-148 and 144-170 of Seq ID No 184; amino acids 91-114 and 110-133 of Seq ID No 187; amino acids 36-60, 56-80, 76-100, 96-119, 343-371 and 367-394 of Seq ID No 188; amino acids 156-183, 179-206, 202-229, 225-252 and 248-274 of Seq ID No 190; amino acids 98-125, 121-148, 144-170, 165-187, 201-223 and 285-309 of Seq ID No 192; amino acids 390-409 of Seq ID No 193; amino acids 6-33, 29-55, 52-79 and 74-100 of Seq ID No 194; amino acids 172-200 and 196-223 of Seq ID No 195; amino acids 12-39, 35-62, 58-84, 156-179 and 175-197 of Seq ID No 196; amino acids 28-53, 49-73, 165-188, 184-207, 203-226, 292-320, 316-344, 531-560, 556-584 and 580-608 of Seq ID No 198; amino acids 200-228 of Seq ID No 200; amino acids 348-374 of Seq ID No 202; amino acids 116-143 and 139-166 of Seq ID No 203; amino acids 203-227 of Seq ID No 204; amino acids 183-208, 204-229 and 225-250 of Seq ID No 206; amino acids 359-384 of Seq ID No 208; amino acids 353-378, 374-399 and 395-419 of Seq ID No 209; amino acids 1372-1398 and 1394-1419 of Seq ID No 210; amino acids 14-38, 34-58 and 54-78 of Seq ID No 211; amino acids 95-122 and 118-146 of Seq ID No 212; amino acids 20-44, 40-64, 60-84, 80-104, 138-162, 158-182 and 178-201 of Seq ID No 213; amino acids 41-67, 63-89, 85-111 and 107-133 of Seq ID No 214; amino acids 165-185 and 181-200 of Seq ID No 215; amino acids 15-44, 40-68 and 64-92 of Seq ID No 217; amino acids 335-360, 356-381, 422-446 and 442-465 of Seq ID No 218; amino acids 50-74, 70-94, 90-114, 110-133, 164-192 and 188-215 of Seq ID No 219; amino acids 91-116, 112-137, 133-158 and 154-179 of Seq ID No 220; amino acids 331-352 of Seq ID No 224; amino acids 116-143, 139-166, 162-189 and 185-212 of Seq ID No 225; amino acids 3-27, 616-640, 636-659, 655-678, 576-598, 594-615, 611-632, 693-718 and 714-739 of Seq ID No 227; amino acids 32-45 of Seq ID No 228; amino acids 112-135, 131-153, 324-349, 345-370 and 366-391 of Seq ID No 229; amino acids 122-143 and 170-195 of Seq ID No 230; amino acids 377-400, 396-419, 91-115 and 111-135 of Seq ID No 231; amino acids 3-27, 23-47, 43-68, 4-30 and 26-52 of Seq ID No 233; amino acids 400-429 and 521-545 of Seq ID No 234; amino acids 61-84, 80-103 and 99-122 of Seq ID No 235; amino acids 8-31, 124-149, 166-191, 207-232, 265-294 and 290-318 of Seq ID No 236; amino acids 20-43, 39-62, 95-122, 117-143, 133-159 and 155-181 of Seq ID No 237; amino acids 1-29 of Seq ID No 238; amino acids 121-143, 139-160 and 156-178 of Seq ID No 239; amino acids 195-219 of Seq ID No 240; amino acids 4-32, 27-54 and 50-77 of Seq ID No 242; amino acids 160-186, 182-208 and 122-149 of Seq ID No 243; amino acids 48-73 and 69-94 of Seq ID No 244; amino acids 151-173 of Seq ID No 245; amino acids 14-41 and 37-63 of Seq ID No 246; amino acids 7-30, 26-49 and 45-69 of Seq ID No 247; amino acids 1-21 and 17-44 of Seq ID No 248; amino acids 43-66 of Seq ID No 250; amino acids 47-71 and 67-91 of Seq ID No 251; amino acids 39-60 and 56-78 of Seq ID No 252; amino acids 199-224 of Seq ID No 253; amino acids 70-94 and 90-113 of Seq ID No 254; amino acids 48-70 of Seq ID No 255; amino acids 1-25, 21-45 and 41-65 of Seq ID No 256; amino acids 27-51 of Seq ID No 257; amino acids 98-125, 144-170, 165-187, 201-223, 285-309, 305-329, 325-348, 400-425, 513-541, 537-564, 560-587 and 583-610 of Seq ID No 192; amino acids 138-164 and 160-187 of Seq ID No 139; amino acids 160-187 of Seq ID No 141; amino acids 350-378, 374-402, 398-426 and 422-451 of Seq ID No 144; amino acids 264-288, 284-308 and 304-328 of Seq ID No 148; amino acids 77-91 of Seq ID No 150; amino acids 111-134 of Seq ID No 151; amino acids 126-153, 149-176 and 172-200 of Seq ID No 155; amino acids 220-245, 241-266 and 262-288 of Seq ID No 158; amino acids 31-53, 49-71 and 67-89 of Seq ID No 159; amino acids 258-280, 276-298, 294-317 and 313-336 of Seq ID No 163; amino acids 458-472 of Seq ID No 164; amino acids 82-107, 103-127, 212-235 and 231-253 of Seq ID No 167; amino acids 26-51 and 47-73 of Seq ID No 168; amino acids 1053-1082 of Seq ID No 169; amino acids 194-217, 213-236, 232-255, 251-274 and 270-292 of Seq ID No 170; amino acids 110-131, 179-201, 197-219 and 215-236 of Seq ID No 173; amino acids 12-36, 32-56 and 52-77 of Seq ID No 176; amino acids 281-300 and 296-316 of Seq ID No 177; amino acids 33-57 and 53-78 of Seq ID No 178; amino acids 171-197, 193-219 and 215-240 of Seq ID No 182; amino acids 363-388, 384-409 and 405-430 of Seq ID No 183; amino acids 102-127, 123-148 and 144-170 of Seq ID No 184; amino acids 149-163 of Seq ID No 185; amino acids 342-366 and 362-386 of Seq ID No 189; amino acids 390-409 of Seq ID No 193; amino acids 50-64 of Seq ID No 197; amino acids 223-249 and 245-272 of Seq ID No 199; amino acids 117-131 of Seq ID No 201; amino acids 116-143 and 139-166 of Seq ID No 203; amino acids 1-21 of Seq ID No 205; amino acids 245-270, 266-291, 287-312 and 308-332 of Seq ID No 207; amino acids 353-378, 374-399 and 395-419 of Seq ID No 209; amino acids 95-122 and 118-146 of Seq ID No 212; amino acids 128-151, 146-169, 314-336, 339-361 and 357-379 of Seq ID No 135; amino acids 159-188 and 184-213 of Seq ID No 137; amino acids 230-251 and 247-267 of Seq ID No 138; amino acids 97-120, 116-139, 135-158 and 154-177 of Seq ID No 140; amino acids 195-228 of Seq ID No 142; amino acids 165-192 and 188-214 of Seq ID No 143; amino acids 6-29, 25-47, 43-65, 68-92, 262-288, 306-331, 326-351, 449-471, 467-489 and 485-507 of Seq ID No 149; amino acids 80-103, 99-122, 118-141 and 137-159 of Seq ID No 153; amino acids 15-40, 36-61, 57-82, 78-103, 99-124 and 120-146 of Seq ID No 156; amino acids 35-63, 59-86, 187-213, 209-235 and 252-277 of Seq ID No 157; amino acids 83-108, 104-129, 125-150, 146-172, 272-302 and 298-327 of Seq ID No 160; amino acids 197-222, 218-243, 239-264 and 260-284 of Seq ID No 165; amino acids 378-402, 398-422, 418-442 and 438-461 of Seq ID No 166; amino acids 44-65, 61-82 and 78-99 of Seq ID No 171; amino acids 1230-1254 and 150-1275 of Seq ID No 172; amino acids 372-395, 391-414 and 410-434 of Seq ID No 174; amino acids 439-464 of Seq ID No 175; amino acids 718-744, 740-766, 762-788, 906-931, 927-951 and 947-971 of Seq ID No 179; amino acids 66-93, 135-161 and 494-518 of Seq ID No 180; amino acids 40-61, 57-79 and 75-97 of Seq ID No 181; amino acids 440-462, 458-480 and 476-497 of Seq ID No 186; amino acids 91-114, 110-133, 129-152 and 148-170 of Seq ID No 187; amino acids 156-183, 179-206, 202-229, 225-252 and 248-274 of Seq ID No 190; amino acids 747-773 and 769-795 of Seq ID No 191; amino acids 6-33, 29-55, 52-79 and 74-100 of Seq ID No 194; amino acids 148-176, 172-200 and 196-223 of Seq ID No 195; amino acids 28-53, 49-73, 165-188, 203-226, 292-320, 316-344 and 531-560 of Seq ID No 198; amino acids 180-208 and 200-228 of Seq ID No 200; amino acids 203-227, 223-247, 243-267 and 263-287 of Seq ID No 204; amino acids 339-363 and 359-384 of Seq ID No 208; amino acids 1372-1398 of Seq ID No 210; amino acids 14-38, 34-58, 74-98 and 94-117 of Seq ID No 211; amino acids 41-67, 63-89 and 129-155 of Seq ID No 214; amino acids 165-185 and 181-200 of Seq ID No 215; amino acids 26-44 of Seq ID No 216; amino acids 15-44, 40-68 and 64-92 of Seq ID No 217; amino acids 90-114, 110-133, 140-168, 164-192 and 188-215 of Seq ID No 219; amino acids 91-116, 112-137, 133-158 and 154-179 of Seq ID No 220; amino acids 311-338, 334-361, 357-385, 381-409 and 405-433 of Seq ID No 223; amino acids 331-352, 348-369 and 365-386 of Seq ID No 224; amino acids 116-143, 139-166, 162-189 and 185-212 of Seq ID No 225; amino acids 208-230 of Seq ID No 226; amino acids 32-45 and 50-72 of Seq ID No 228; amino acids 131-153, 149-172, 324-349, 345-370 and 366-391 of Seq ID No 229; amino acids 104-126, 122-143, 148-174 and 170-195 of Seq ID No 230; amino acids 91-115, 111-135, 377-400, 396-419, 532-553, 548-569, 715-744 and 740-768 of Seq ID No 231; amino acids 3-27, 23-47 and 43-68 of Seq ID No 233; amino acids 118-141, 137-160 and 521-545 of Seq ID No 234; amino acids 4-30, 26-52 and 48-75 of Seq ID No 233; amino acids 61-84, 80-103 and 99-122 of Seq ID No 235; amino acids 20-43, 39-62, 95-122 and 117-143 of Seq ID No 237; amino acids 195-219, 215-239 and 235-259 of Seq ID No 240; amino acids 27-54 of Seq ID No 242; amino acids 197-217 and 213-232 of Seq ID No 241; amino acids 48-73, 69-94 and 90-114 of Seq ID No 244; amino acids 133-159 and 155-181 of Seq ID No 237; amino acids 14-41 and 37-63 of Seq ID No 246; amino acids 29-52 and 48-70 of Seq ID No 255; amino acids 1-29, 24-53 and 49-76 of Seq ID No 238; amino acids 1-21 and 17-44 of Seq ID No 248; amino acids 122-149 and 145-172 of Seq ID No 243; amino acids 3-27, 23-47, 43-66, 62-85, 136-165, 156-185, 81-107 and 103-129 of Seq ID No 249; amino acids 160-186 and 182-208 of Seq ID No 243; amino acids 27-51 and 47-72 of Seq ID No 257; amino acids 177-191 of Seq ID No 136; amino acids 27-51, 47-71 and 67-91 of Seq ID No 251; amino acids 7-30, 26-49, 45-69 and 65-89 of Seq ID No 247; amino acids 126-137 of Seq ID No 232; amino acids 22-43, 39-60 and 56-78 of Seq ID No 252; amino acids 693-718, 714-739, 438-460, 456-477, 473-495, 806-828, 824-846, 616-640, 636-659, 655-678, 674-697, 576-598, 594-615, 611-632, 851-877, 873-898, 731-760, 756-784, 3-27, 23-48, 957-982 and 978-1002 of Seq ID No 227; amino acids 157-182, 178-203, 199-224 and 220-246 of Seq ID No 253; amino acids 70-94 and 90-113 of Seq ID No 254; amino acids 20-44, 40-64, 60-84, 80-104, 138-162, 158-182 and 178-201 of Seq ID No 213; amino acids 1-25, 21-45 and 41-65 of Seq ID No 256; amino acids 121-143, 139-160 and 156-178 of Seq ID No 239; amino acids 12-39, 35-62, 58-84 and 175-197 of Seq ID No 196; amino acids 18-42, 38-62, 58-82, 78-102, 98-122, 118-142, 138-165, 256-279, 275-297, 293-315, 163-189, 185-211, 207-233 and 229-255 of Seq ID No 146; amino acids 46-75, 110-131, 127-148, 188-216, 212-240, 344-367, 361-384, 382-405 and 401-424 of Seq ID No 147; amino acids 151-180, 176-205, 245-274 and 270-299 of Seq ID No 154; amino acids 937-962, 958-983, 102-130, 126-154, 150-177, 823-849, 845-872, 867-892, 285-314, 310-339 and 335-364 of Seq ID No 152; amino acids 97-119, 115-137, 133-155 and 151-173 of Seq ID No 245; amino acids 20-43, 39-62, 58-79, 69-94, 90-115, 167-189, 185-207, 203-224, 296-320, 316-339, 335-358, 354-377, 404-431, 427-453, 449-475, 471-498 and 494-521 of Seq ID No 161; amino acids 40-62, 76-97, 251-276, 272-297, 291-316 and 333-358 of Seq ID No 162; amino acids 335-360, 356-381, 422-446, 442-465 and 461-484 of Seq ID No 218; amino acids 46-69, 65-88, 84-107, 124-149, 186-211, 207-232, 265-294 and 290-318 of Seq ID No 236; amino acids 56-80, 76-100, 96-119, 343-371, 367-394, 410-436 and 432-457 of Seq ID No 188; amino acids 281-307 and 631-654 of Seq ID No 202; amino acids 41-66, 62-86, 82-106, 102-126, 417-444, 440-466, 528-554, 550-575 and 571-596 of Seq ID No 145.

21. The antigen according to claim 20, whereby the antigen further consists of
a) 1 to 50 additional amino acid residue(s) or
b) at least one amino acid residue heterologous to the core amino acid sequence, or
c) 1 to 50 additional amino acid residue(s) and at least one amino acid residue heterologous to the core amino acid sequence.

22. The antigen according to any of claims 20 to 21, wherein the amino acid residue(s) is/are flanking the core amino acid sequence C-terminally, N-terminally or C- and N-terminally.

23.-26. (canceled)

27. A pharmaceutical composition comprising a protein, as defined in claim 12 or a nucleic acid molecule as defined in claim 1.

28. (canceled)

29. (canceled)

30. An antibody, or at least an effective part thereof, which binds to at least a selective part of a protein as defined in claim 13.

34. (canceled)

35. A hybridoma cell line, which produces an antibody as defined in claim 30.

36.-41. (canceled)

42. A method for diagnosing an infection with a Borrelia organism comprising the steps of:
a) contacting a sample obtained from a subject with the protein as defined in claim 13; and
b) detecting the presence of an antibody against said Borrelia organism in the sample.

43. A method for diagnosing an infection with a Borrelia organism comprising the steps of:
a) contacting a sample obtained from a subject with a primer or a probe specific for a nucleic acid molecule, or a fragment thereof, as defined in claim 1; and
b) detecting the presence of such nucleic acid molecule or fragment thereof in the sample.

44. A method for diagnosing an infection with a Borrelia organism comprising the steps of:
a) contacting a sample obtained from a subject with the antibody according to claim 30; and
b) detecting the presence of an antigen of said Borrelia organism in the sample.

45.-48. (canceled)

49. A method for the treatment of a Borrelia infection in an animal or man in need thereof, comprising the step of administering to said animal or man a therapeutically effective amount of a pharmaceutical composition 14 or 15.

50. The method according to claim 49, wherein the Borrelia infection is an infection with Borrelia burgdorferi s.s., Borrelia garinii, Borrelia afzelii, Borrelia andersonii, Borrelia bissettii, Borrelia valaisiana, Borrelia lusitaniae, Borrelia spielmani, Borrelia japonica, Borrelia tanukii, Borrelia turdae or Borrelia sinica, preferably Borrelia burgdorferi s.s., Borrelia afzelii or Borrelia garinii.

51. A method for immunizing an animal or man against infection with a Borrelia organism, comprising the step of administering to said animal or man an effective amount of the protein, or a fragment thereof, as defined in claim 13, or of the nucleic acid molecule as defined in claim 1, wherein the effective amount is suitable to elicit an immune response in said animal or man.

52. The method according to claim 51, wherein the Borrelia organism is selected from the group comprising Borrelia burgdorferi s.s., Borrelia garinii, Borrelia afzelii, Borrelia andersonii, Borrelia bissettii, Borrelia valaisiana, Borrelia lusitaniae, Borrelia spielmani, Borrelia japonica, Borrelia tanukii, Borrelia turdae and Borrelia sinica, preferably Borrelia burgdorferi s.s., Borrelia afzelii or Borrelia garinii.

53. (canceled)

54. (canceled)

The application's sequence listing, which the Patent Office published only in electronic form, follows.

SEQUENCE LISTING (750 sequences)

SEQ ID NO: 1 - DNA, 1968 bp, Borrelia afzelii
atgaaatttaatcgatttttaatgttattcctttttaattttggtgttctgttaggcagtgatactacagcattagggcattatcaaaaggcccatgagtattatttgtctaaaaggtattatgatgctattgatgagcttgttgaggccataaaaattaatcccaattattatgaagcttataaatttattgcatcaatttattattctcttaagatatatactcaagcacaatttttcatagagaaagcttataaaatgtctaacgaagacacggaatataaaattctttatgcgaatatattattaaaaaatgataaaattgatcaagcaaaaaaaatctattctgaggttttagttaaacagagaaacaatattgatgctttggttggacttgcttcaatttttgaaaaaaatggattattcatagctgctgctaattattatttatctattcttgattatagtcaaaataattatagtgcgtttgagcatcttattgatatttatcaaaggttagaaatgcatgacaagattagacatttgataaataaagttagaataaattttttatcttttccagattttcataaaagagtagccgaattttatattagcattaataatttaggacttgctgaaaagtatgctttaaattatttagctttaattgaaagttcttacaaagattttggggttgtcgatgcatatcgattgcttgcgcttgtttatttgcatgaatttaaatatgaggatgcaatagaagcattgcaaaaagctattttagttgataaagagtccgatgagctttattatttattaggttattcttacttgaaatttgggaatgttgaaaaggctattttaaatttagagcgagctaaaaatcttaaaaaagatatagaattttataatattgctcttgaggagagtttttttgcatctaactttagaaattttttaaaaaatgattccaatactaaaatttctaagcattatgaaaatgagggatctaaagcttttaaatctttaaatttaaacaaagcattgtttaatacaaaaaatgctgttgatatttggcctgataatgatagtgccaggtttttgctttcaaaaatatataagctcatgaatttagatattatggcttatgagcagcttttttatttagtaaaacagagaaattctactgattctagaattttggatttttatgatgttgtgtcttttgatgttagaaagtctttattttataaatatggatataaaagtattgctgattttaataaactttacgatgacagaatggtttatagaatggctatttttactcaaagtgagaataagttttttggtgcaaacgatttgatattaagatacgctgaaagggtgcttgagcgtaatttaaatatagaaatagttaactataattttgattacaataaaaataaagattatctgattaataatttttccgaaggattttcttattcaagaaataataatttggatttatttttaatttttgattttaaggcagatattttgaaaaatacagctactttggtagtaaatgttttctcaggaaaaacagggattaaggttggttctttctcttatgatgtgggtggtgttaattatttaagcaatgctttaaattccctttctaaagatttttatgattatttgcccaaaaaaggaaagattcttcaaattaaaaatgacgatactcttattaatcttggtcaagtaaacggtgttgtaaagggtgatatttttttgattctcaaagaaggcgctttaaacagtggtaatagagattctagttttattgtttacaataaaacagatattttgggggagattttaattgaggatgtaagtgattatatttctagaggcgctataaaatcttctacgtttttaaaagattatattcaagagggagcaactgtgattgtaaaaaga

SEQ ID NO: 2 - DNA, 714 bp, Borrelia afzelii
atgaatctaatgttaataactttcaatgaatttaaaacaggaatttcgctcaatgacactagagcagaacatcttgttaaaatcttaaaattaaaagataacgacaaatttaaatttggtattcttggagaaaaaaacatctaccattgcatttataaaaaagataaaaaattatttttcaagaaaatttttaaaataggagaatctaataaacttaaaaaaataaatgtactaattgggatgataaggccaattgttgctaagagaataataaaagaacttgctagcattggaatatacgaaataattttttttaacactgagcttactgaaaaatcatatttaaattctaaaatctttaaaaacaatgattacgaaaaacatttaatagctggagcaatgcaaggaggagtaacatacttcccaaaaataaaaattatggggaatttaaaagacagccttaaatatattaaacaaaaaaattttgaaataaaaatattgcttgaaaaaaatagcaaaaaaaatttaattgacatagaacaaacaaacaatgcaaccattattgtgggacctgagagagggtttacagagaaagaaaaacaattaataacacaatataatttttcctcttatagtatatccccaaacatcctaagaacagaaacagctataattgctgcatctattattactgcatcgaaactaattaatata

SEQ ID NO: 3 - DNA, 945 bp, Borrelia afzelii
atgaaaatattttttgtaagttcttcttctattgctttagaggttttcaaggagattgtaaagcattatgaagtggtgggagttttgaccttgcccgataaccctaaaggtagaggacaaaagttaagtcaaaatgtaataaagttagaagctattgctaagaatattaaagtttttgatcccttgattcttgatgataatatattaaatttaattagggatttgaatccggatttaatgttagttttttcttatggcaagatctttaaaaaagaatttttagatattttcccaaaaggatgtatcaatgttcatccttctcttttgcccaaatatagaggtgtttctcctattcaatctgcaattttaaatggcgattgtgttagcggtattactattcagaatatggctttgaaaatggatagtggaaatattttagtgcagaaaaattttaaaataaaatcttgtgatacaagttatgatatttcaaaacttgtatcaagtcttagtccaaaccttgttttagaagctttggaaaaaattggcaaggggtttttgggaattcctcaaaaatcgagtgaagccactttttgttctttttttaaaaaagaatcgggatttgtagattttaatttaagtgcatttgagattaaaaacagaattaatgcatgcaatccttggccacttgcaagagctaggcttgattatggcgatattatttttcatcgtgctgattttttgaaaatagatttatataaagagaaaaaagtaggagaaattgttgattttgattctgaaaaaggattatttgttaataccggagaagggattcttttgcttttagaagttcaaaggcccggaagaagggttttagattataagtctttttataatgggagcaggcagctaataggacaagtgttttcttcaataggaggggtatat

SEQ ID NO: 4 - DNA, 807 bp, Borrelia afzelii
ttggaaatcgaatttaatatacttgaaaaacagtacaaagatttactcacaatttcttactttaaagaagaacttgacgcaaatgacgcttttttaactattcattctggtgctggaggcactgaagcatgtgactgggttgcaatgctttacagaatgtattcaagatatgcagagagaaaaaaatacaaaacagaacttattgatttgcttgaagcagaaggtggaatcaaatctgttacaatagaaatcaaaggtgaatatgcttatggactgttaaaaagtgaggtcgggatacatcgtcttataagaatttctccgtttgatgctgctaaaaaaagacatacctcttttgcatcggtatttattgaccctgttattgatgaaaaaatagaaataataatcaaaccagaagatataagaattgatacatacagagcatcgggagccggaggacaacatgtcaacaaaacatcttctgctgtaagaataactcacattgaaacaggaatagtcactcaatcccaaagcgaccgaagtcaacacaaaaacaaagatatggcaatgaaagttttaaaatcaagactttacgaatactataagaataaagaagatgaaaaaaacaaatccaagcaagacacaaaaaaagaaatttcttggggcaaccaaataagatcttacgtatttcagccttacaatttggtaaaagatcatagaacaaaatttgaaaattcaaacatcacttcggttatggacggcaatatagataatttcatagaagagtatttaaaatggaaaagcttaaac

SEQ ID NO: 5 - DNA, 1026 bp, Borrelia afzelii
atgaaaaaaaaccaattaatacttcttctatttataccacaaattatttatgcaaaaagctattttgcatccgatgtatttttcaataaataccaaaaattaaacgaaaaaccaaaaacgggattttacattgaatattattttattgatgatattgaaaaactctacttatataaagaaaataatttaataaaatacaagacaattcaaatcatagaaaacacaagaaaaatcacatattatgatacaaaagatacaaaaagaaaagaagaaatttacgacaatttaaataataaaatacaagaaattgaatatggcaacaaaggaaaaattcttgaaacagtaaattactattatgaaaacggcaacttaatatccaaaaatttaaaaaccaaaaaccaaaaaccaaaatcaatctattattctaaagatgaaaatggcaaattactaaaaataacaggatcggattttcaaatttggaactatggaattaatggcgacataaaatctacatattttgacatcaaaaaatcaacaacaaaagtgataaaatatgacgacaaaaaaagaagtttagacagcgcaataattgttaataataaaataaaatctaaagaaaaaaaccaatatttagatgaacaaaaaacagtaaatatttttgaagaagaaaattcaaaaattatatctacctatcaaggaaacaacctaattaaagaagagatatataaaaataatgaacttataaaaataaatgattttcaatacaactcatctgatatgatgattcttcaaagcactaaagaaaaggataaagaccaatacaccaatactaaaattgaatatgaatataaccaagacaaccaattaaaaagcaaaaaaatttatgaaaacgatacaatttatctaaaaaccgaataccacaatgataatgaatatgaagaagaaatttactacaataaaacccccgctcttagagtaaaacacaaaaatggaaaagtcaccgaagaaaaaccaataggaacaaat

SEQ ID NO: 6 - DNA, 1251 bp, Borrelia afzelii
atgatgcttttaaagctaacagaaattacaaaaattgcgtatataatttttaaaaattcaacaaataaaatagctttaataggttctggaatatcattaagtttagtaatgatcccattaattattgtctactatatgtctagtaatattatgacttctactattaataaatatattgaaagtgaaggattttccacgcaaatagaatataatgacacaaataaaactcatcaactaaaagacagattagactcatttaaaaaaaaatataattacaaagatttaaattatttttttgagaaaagaacttatggaattattggaaataataaaaaacaaggtgtattaataagagcaatagaaaataaattcatattggaaaacaaatcaataaaattactacaaggtgctaaaaatttaaaaaaggattccatactcatttcaaatcaaataaaaaataaacttaatttaaatctcaatgaaaaaattgacattttgattccaaatacaaaaaacaataaaataatgcccagaataaaaaagtttaatatctcaggaataattgaaaccggactaaaagatattgataataatttggtgttaatttcttttgaaaacgaaaatttaatgtcaaaaaagttttcaaaaagcataattggagttgaaacaagttcaaattacataaaaaacaatgaaatcttgaagcagaatttagaaactgaatttaaagaattccaaataaaaacattctatgaactttacttaaataaatacaataatctagatataagtaaaaaacttttaatattcattatggctttgattataatatttgcaagtatcaatatatcctcgtccctttcaatgcttatttttgaaaataaaaagaaaattgcaatactaaaatcaattggaatgaataatttaaatataaaaataatatttcttttgatatcgctcacattaagcaccaccttttgtggaattggaataataattggaaattatttaacacttaaaatatcttatttaataaactttgttgataatgttttaaacttttttttaaaaatatttggagaagaatattctgaaatattaaactcagaatattacgtatctgaatttcaaatacatttaagcttaagctttagcttaacacttcttggcttatatatgctaataagcattttaactacaatgattccgcttaacattatctccaatctaaaagaaaaaaaaatcttgaga

SEQ ID NO: 7 - DNA, 432 bp, Borrelia afzelii
atggatataggtttaataggagttaattcagctttgacaatctcagcaataggttctgcgttgggtatgggagcagcaggcagcgctgctattggagcatggaagaggtgttatatgcaaggaaagcccgcaccatttttattgattgtttttgtatcagcaccattgactcaaataatatatggatatattttaatgaacacgttatatgaggtaatgatgcagacaaatccgtggctgttacttggagctggtcttggtggtggatttgcgattgctgtttctggatttgctcaaggtaaagctgcagcaggcgcttgtgatgctttttctgagactgggaagggatttgctacatacctattagttttggggctaatagaatctgttgctctttttgtaatggtatttttaatgatatttaagtttgtt

SEQ ID NO: 8 - DNA, 1725 bp, Borrelia afzelii
atgaatacaaaaggaaaagtcgttggagtaaatggaaacttagttactattgaggtagaaggttcagtttctatgaatgaggttttatttgtaaagactggtggtagaaatttaaaagcagaagtaatccgtgttagagggaatgaagttgatgcacaagtttttgaattgacaaaaggaatatctgttggagatttagttgaatttacagataagcttttaacagttgaattaggaccaggtcttttaactcaagtgtatgatgggcttcaaaatcctttgcctgaactggctattaaatgtggattttttttagaaaggggagtgtatttaaggcctttaaacaaagataaaaaatggaattttaaaaaaacctccaaagttggagatagcgttattgcaggagattttttgggatttgtaattgaaggaactgttcaccaccaaataatgattccattttataaaagagattcttataaaattgtggagattgtaaatgatggtgattattcaattgatgagcaaattgctgtaattgaagatgattctggtatgaggcatagtattacaatgtctttccattggcctgttaaaattcctattactaattacaagcaacgacttatccctagtgagcctatgttgactcaaactagaattatagatacattttttccagtagctaaaggaggaactttttgcattccaggtccttttggagctggaaaaacggttcttcagcaggttacaagtcgaaatgccgatgttgatatagtaattattgcagcttgtggtgagcgagcaggtgaagtagtagaaactcttaaggagttccccgaattgatagatccaaaaactggcaaatctttaatggataggacttgtattatttgtaatacatcttcaatgccagttgcagctagagaagcctctgtttatactgctattactattggtgagtattataggcagatgggtcttgatattcttcttttggcagattcaacttcaagatgggctcaagctatgagagaaatgtctggtcgccttgaggaaattcctggtgaggaggcttttccagcatatcttgagtctgttattgcttccttttatgaaagggcgggcattgtagttcttaataatggtgatattggatctgtgacagttggtggttctgtaagccctgctggtggcaattttgaagagccagttactcaagcaactttaaaggttgtaggagcattccacgggcttacaagagaaaggtctgatgctaggaaatttccagctattagtcctcttgaatcttggagtaaatataaaggtgttattgattccaaaaagacagaatatgtaagatcttttttggtaaaaggcaacgaaattaatcaaatgatgaaagttgttggggaagagggaataagtaacgaggattttttaatttatttgaaatctgaactgcttgattcgtgctatttacaacaaaattcatttgattctattgatgctgctgttaattcagagcgtcaaaattatatgtttgatatagtttataatattcttaaaaccaatttcgagttttctgataagcttcaagcaagagattttataaatgaattaaggcaaaatcttttagacatgaatctttcttcttttaaagattctaagtttaataaattagagcatactttgagtgaattggtaaattttaaaaaggtaatt

SEQ ID NO: 9 - DNA, 1194 bp, Borrelia afzelii
gtgatgaaaaaagtagctattattgatggacttagaacgcctaatactaagtttggaggttcgtttagaggtttagatattattgatgaatcttcaaaagttgttaaagctttgcttggaagaaataagttatgtgaagtggatgaggtcattattggaaatgtaatatctgcgggacttggtcaaaatattgcaaggcaaattgctttaaagtctaatttgggcgatactgtgcctgcatttagtgttaataaggtttgtggttctggtcttaaggctttggaacttgcatttaactctattgttcttggaaacaatgatattgttttggctgggggagtggaagatctaaccaattctccttatttattgcccagaaagattagatttgacggtcttaaatttggtaattttgaacttgaagattcaattcaaaaagatgccttaatagattctctaaattttatttctatgggacttacggcagaaaatctttcagaaaaatataaaataacaagagagatgcaagatgaatttgcatataattctcatgtaaaggcattgaaggcaagagaacttggatattttgaagatgaaatttatcctttgactgtttttgataagaagactaattctagcagggttgtctcaagcgatgaggaaataagagataatgtaactctgaataaactggcatctcttaatcctgtttttaaagaattaggcacagtaaccgctggaaattcttctagtttaaatgatggggcttgttttttaattttagcaagtgaggaaaaagcaaaaagcttaggaataagtccattagcttatattggaggatttaaaagtgtagggcttgatccgctttatatgggttttggagcttatgcagctattgaaggcattattagtaaattaagtttaaaccctagcgaaatagatttgattgaagtaaatgaagcatttgcggctcaagcattaagtattgaaaaggccttgtttaaaaaatacaatataactagcgatattattaatataaatggcggtgctattgctttagggcatccatttgcagttagcggttcaagaattttattaacactttctcgttctatgaaaatgaagaataaagcaaaaggaatagcatctgtttgtgttggtggcggacaaggaatttctagttttttgtataga

SEQ ID NO: 10 - DNA, 1659 bp, Borrelia afzelii
gtgagaatggaaaatcaaaaagatttacaagaaaattatttgaaagtacttgaaagggtagaacttggaagtcgtgtttctggaacgattgttaacattatgaaggattatgttctagtcgatgttggctataaatctgaaggctttatcaagattgaagaatttgaaaatgttcccaaaattggtgataaacttgaagcaatcgttgtaagaataggtggagaattggggctgattttaagtgttgaaaagcttgattctttgaattttcaagataaagtaaatgagtatattcaaaataaaaaagtaattaaaggtaaagtgttggttgagctttctaatggctataagattcaaattaatgaaaatgtttctggctttatgcctttttatttaagctctaaatctaaggatgagaaattaaaaagaggctctattgttgaattttatattcttgaagcaagcgaaacggacggtttgaggcttattcttgataggcgcactttagaaagagaaagggagcttgccaagagaatagagctagtaagttcttataatgaagaagatgtggttgatggtatggttgatcgtattacagaatatggtgcgattataaaaattaaaaattttgttacaggaattttacataaaagaaatattgcttttaatcaagttgaaaatattgaagattttattagagttggtgataagttaaagttgaaaattattaagataaatccacaaacaggtaaaatggaattatctcttaaggccttaaaagcaaatccttgggattctgtagatgttaaatataaaattgatagcattgtaaaagggaaagttgtaaaaattttgccctttggagctgttattgagcttgacagcgaattgtcagggtttttacatataagtaatttttcttggataaaagtagtaaagagtcctcaagaattaataaaacttggtcagatggtagaagttaagattttagagatagacaaagaaaatcaaaaaatatctctgggtattaaacaaattaatgagaatccttgggagagattaactgagaaatatcctattggaaaggttattcaaggagttgttactaatattacaaaaacaggcgcttttgtaaatattgaagaaggcatagatgcttatgtgagcaagtttgatatttcttggcttgaagagattgatcctgaggaatattttaagataggcgatttagtgaatgggaaagtgcttgaggttgacaggcgaaagagaaatgttagattaggaattaagcagttagaagagagtccttgggaagatttttctaaaagctataaaaaaggtgatgctattgaggttgagattgtagagaaaaagtcaaaaggctttcaagtaagagtttataataaaataatgggatttattagcaaaatccaactaggagatacaaaagaatccagtttagaaacttttgaaaaattaagcattggagataagcttaaggtggtaataacaaatattgattctaaagacaaatcagtgctgctctcttatagggagtatgagaatcaaaaatcaagagaagagatttcttcttatttatttaagggtaatgatgaggaatcttataagccgtttgaaaatttgctaaagagggatgaa

SEQ ID NO: 11 - DNA, 1884 bp, Borrelia afzelii
atgaccaaaagacttaataataagtatcggacaaaaacaatattaacaatattcttaggtataactttgctaactgtttacaaatatttcacactaatggtctttaataacagtccagacaacataatatctttaaagtcaaatgatattgtcaaaagaggaacaatttatgatagaaatggcaaaccaatagcattctcttcaaagtcctactcaatcggaacaaatcctcaaaaaatagaaaatattgtcagcacatctgaaactcttggcgcaatactccaaattgattcaagaattttaaaagaaaagctttcttcaaataaaggatttttatacataaaaagaaaaataaaaagggaagaatcggatttaatcaaaagaattcaagctgaaggcaggctctcaaacattactttatatcctgattatacaagaatttatccttttcgctataccacaagcaatattactggctttgtaggaatagataatcttggacttgagggaatcgaattttctctaaatagtatattaggaacagataaaactagacaacaatttttaaatgaagaattagaaacaaataatatttacttaacaatagatatgaatatacaacagggtgttagcaaaatagctgaaaaatactttaaagaaaataatcctgaaagtttaattactttagtaatgaactcccaaaatggagaaatattgtccatggttcaatttcctcaatatgatgcaaacttttattctgaatatcctgaagaaatccgaaaaaacctttcttcatcgttaacctatgagcctggaagcattaataaaatttttacagttgcaatattattagaaagtggaaaattaaatttaaaagaaaaatttttagacaatggaatatatcaaaaacaatttccatcaggagagaaaattacaatcaaaaccttaaatcctccctataaatacattgactctacagaaattttaatttattcatcaaatgtaggaatagcttacattactgagaaagttagcaatgaatacttttacaaaaaacttttagattttggatttggggaaaaagttggatttccatttcccggagaaacaaaaggactgttaaatcattattcaaaatggtcaggacgaagtaaggctacaattggatttggacaagaaataggggtatcagcggttcaaatattacaagctgcaagcatactgggcaacaatggaataatgttaaaacctagaataataaaaaaaataagcactgacaaaggagaaagtattcaagaatttgataaagaagaaataaaaagggtaatatctaagaattcagcacaaaaagttttaaaaatgatgagagaagttgtaaataaaggtggaattccaaatcttaaaattaaaaatctcgacatttctgcaaaaagcggaacatctcaggctattgatagaaaaaccggcaaatactcagaagaagactatacagcctctatcttggcaatataccccacagaacaaccaaaatatattatttatattgtatacagatacccaaaaaaaataatatatggaacaagaatagcagctccaatggcaaaagaaataatagaatttattgaataccaacaaaatacaaacgcatataaaaaaattaaaatgccatcaaaaatcaaaattcctaaaaccgacactaattataaaaacaaagaatacttgccaaattttatcaatctttccaaaagagaatcaatagacatactaaaatactatgaaaatacaataaaaataaaaataaatggcgacggatttgtttacaagcaaagcatatctcccaatacaaaattagaagatatagcagagcttgaactgtatttaaaa

SEQ ID NO: 12 - DNA, 1008 bp, Borrelia afzelii
atgattataaatcataatacatcagctattaatgcttcaagaaataatgccattaatgctgctaatcttagtaaaacccaagagaagctttctagtggttacagaattaatcgagcttctgatgatgctgctggtatgggggtttctggcaagattaatgctcaaataagaggcttatcacaagcttctagaaacacttcaaaagctatcaattttattcagacaacagaaggaaatttaaatgaagtagaaaaagttttagtaagaatgaaagaattagcagttcaatcaggtaacggaacgtattcagactcagacagaggttctatacagattgaaatagagcaacttacagacgaaattaatagaattgctgatcaggctcaatataaccaaatgcacatgttgtcaaacaaatctgcttcccaaaatgtaaaaacagctgaagagcttggaatgcagcctgcaaaaattaacacaccagcatcactttcaggatctcaagcttcttggactttaagagttcatgtgggagcaaatcaagatgaagcaattgctgtaaatatttattcagctaatgttgcaaatctttttgctggtgagggagctcaagctgctcaggctgcacctgttcaagagggtgctcaagaagaaggagctcagcaaccaacacctgctacagcacctactcaaggtggagttaattctcctgttaatgttacaaccacagttgatgctaatacatcacttgctaaaatagaaaatgctattagaatgataagtgatcaaagagcaaatttaggtgctttccaaaatagacttgaatctataaagaatagcactgagtatgctattgaaaatctaaaagcatcttatgctcaaataaaagatgctacaatgacagatgaggttgtagcagctacaactaatagtattttaactcaatctgcaatggcaatgattgcacaggctaatcaagttcctcaatatgttttgtcattgcttaga

SEQ ID NO: 13 - DNA, 1995 bp, Borrelia afzelii
atggcatcaggattttttgttcctggacttgagagcaaatataatactaaagaaattcgtgaatccatgcttaagcccgataaagccaaaattgattcttcttttaagaaacttgaatctttagagcaagagaaaagtgcttggcagttaattaatagaaaaatctctactttaaattctcttgcaaaagaattgacctcacttaacagtccttttaatttaatgtcaggaaattctagtaatagtgaagttttgaccctgtctactcgatatggatctaagaatgagactcacaagttaattgttgatcaaatagcgtcagccgatgtttttttgtcttcaaactttgatcctaaaaaagttacaattccagaaggagaatatgtatttttagttggcaagaaagaaattaatgtaaaaagtaatggtaacattgatttacttgtaagggatattaataacaagggaaaaggctttttgtctgcaaaaatagtaaaaagtgataaaaacgggaatagtcgttttattttgcaatccttaaaggaaggtaaagaaaataaacttattataaaaggggaaggattagcttttgctaagcaaattggcattttaagcgaattgaaaaccaattttaatcccaacctttcagatattgttgtaaatcaatctagtagtaataatagacttgcttttgaaaataataatcttgttttaaatccactttcagaggtgtcgattgaaatccctgaagatattgaaattacatctaggagtaaaattaaatttgaagttaagtattttgatacaggtttagaagagtctgatagtaaaattatttttaatcctggagaagctacatttaaggatgcaaaagtcgacagtgaagatagtgtggttgatcttggatctgatttaaaaactcctttggaaaaaaaatatattcaaatgaatatggttaaaatatctagcaaggaaggttccttggagcttcctttaataaatatttcaaataattttgaagaagttgaagttgatattggagctctttctaatttagaagaaataaatattgaaaataaagcgaataataaagtagttgtgattagtaatgtcgaagtttttgatccaaaaaatagagatggttatttgccaataaatgctaaaagttttgctgagaatgcaaaaattaaatttgatggagtagatgttgagagagattcaaatgttattaatgatttagttccaaatgtgacattaagtttaaaaaaagcttcaagcgatatggttgaggctaaggttgagcccgattatgaggggattaagagaattcttttagattttattggtgcctataatgaggttcttgctgagattaatattgtaagttccaacgaagatcaacttggtaatcaaaagtctagtatagttgaagaattgacttatcttagtgagtctcaaaaagaagaggcttataaaaatttaggcattctaaggtctgaatttttattaaaaaatcttaaatctagactagaatctataatttttaagccctatgttactagtgatcctaatttttcaataattaatcagataggagtttttactaactccatttcttcttctggtggactttctagatatttaagacttgacgagaaaaagtttgatgaatcaattcgcaataacattgataatgttagagaactttttttatttgaccttaatggtgacagagtatatgataatgggattgctaaaatgctaggagattgtttgtctccttttgtgacttctgggggagttatttataataaaataaaaaattacgacttgaagattattgatcaaaaaaataaagttgaagactataaaaagaagtacgatgatagagaaaggaaaatagaaggagaacttaacaccttagattttactgttaagcgcatgaaagatcaagaaaatacattaaaggcttttgattttaatcagagaaataga

SEQ ID NO: 14 - DNA, 1203 bp, Borrelia afzelii
atgctaaatttttgtttattcaactcaaaatccgttttaactggaaatgacaaactagataattcagcggtcctaattaaagataataaaatttttgatattgtaacatctgataggcttaaaaaaatggatcttagagaatatcaaatgattgatacaaaaggcaactatataactcccggactttacgacagccatattcatggatttcacggttatggaacagaccagtgttcaacagaatcaatacttaaaatgtcagagcatttagcacaatatggcgtagtaggatttttaccaactctttatccaagaccaatagatgaaatgattcaaataataaaagcttgtacagcagcaattggtaaagaaaagggagctaaaattctaggacttcaccttgaagggccatttttttcccctgaaaaaagaggagcgcaccctgtttcttatcttcatgagcctagcattaaagttatgcaaaaactaatagatgctgctggcgggatatttacaggatcaaacggcaaaagaaaaacacacataaaaacaatgactgttgctcccgagcttaaaggaatgagagaacttgcaatattttgccttgaaaataatataaaccttcaagcaggacacacaaacgcaaaatatgaaaatatgatcgaaggatttcaagttggaatacttcacacaacccattttttcaacgcaatgtcaaaacttgaccacagaaatccaaacgcaataggagcagtattaatacacggtgacgtttcttgtgaaattattgcagatggtcatcatatacacccaaaattagttttaatgcttagaaagcttaaagatataagtaaaatagtacttgtaactgatggacttactccaaattttcaaacttctggaaaactaattgcaaacggagatgaagtttatattgcagaagatggattattccacagcgtaaaaagcaacacaatagctggatcaacacttacaatgatacaaggtcttaaaaatttaatagaattcggctacagtttgagcgatgctgttcaagcaagctcttacaatccaacaagaattcttaatattgacaaaaaggggttaatatgccatggatacgatgcaaacatcaatgtcttagataaagattttaatctaaaattaacaatgatagaatctaaaataatttttaacaatctc

SEQ ID NO: 15 - DNA, 1881 bp, Borrelia afzelii
gtggattcaacattctcaggaatagaaattggcaaaagaagtttatttgcacataaagatgctatgaatacagttggtcacaacttatccaatgctacaaaacctggatattcaaggcaaagagtaacaatgaaaaccgcaattcctctttatgctccacaactaaacagagctaaaaaacaaggacaattgggtcagggaatcgtggttcaatctatagacagagtaaaagacgaactacttaacacaaggatcattgaagaatcacaccgactaggatactggacttcgcaagacaaatttacatcaatgttagaagatgtttataacgaacctgaagatcagtcaataagaaaaagattaaatgatttttgggaaagttggcatgatctagcaaatcaaccacaaggtttggcagaaagaaagataatcttagaaagaggcaaatctttttgcgagggaataagaagcagattccattcgcttgaaagaatttacataatggcaaacgatgaaataaaaattacaacagatgaggcaaacaattacattagaaacattgcaaatcttaataaacaaatttcaaaatctcaagcaatgaaagacaatccaaatgacttaatggatgcaagagatttaatggttgaaaaattgggcaatttaataagcgtatcaattgaaaacaaacagaatcccaatgaatttttaattcactcagaaggaagacaccttgtacaaggttcaattgctaatgaatttaaactagaagctacaaacggacctaccagaaccagatggaacattttatgggcaaataatgacaaagtccaccttaaaacaggaaaactaggggctttgcttaacataagagatgaagagattaaaaatgaaatcaatgaactgaacaatctagctgccaacattatagagcttgttaacgaaatacatgagacagggcatggaatggataaaaaaagcggaagaagctttttttatcaagaactcaaactaactgacgatcgcggtcgatatgatactaacggaaatggccaatttgattccgttcatattttcaaaattaatagcacaaacgaaatattcccagaagagaaattgggattttatggaactcttaaatttgagactacaaatagcaatgagattgtagaaataccttacaatgctccagatacggttcaagatgttataaatagaataaacaattccgatgcacaagttacagcaagaattaactcagaaggcaagcttgaaatcaaagcagttaaagaacaagaaaatgagaacataacatttagaatcaagcatatagaagattctggattatttctaacaaaatatacaggaatattaaatgaatctggacctgagggggcttatgattataaaaatattgacacaacagacaaattaacgcccaaatccacttattcaatctcgcctttaaaaaatcctgcagcatggataaaagttgcagacacgatagactcagatccttcaaaaatagcatcgggaatcaaaaatctaacaaatgaaatatctattggggataatcaagcagcactgagaatctcctcttttggaaattctcagattatgattggcaaaaatttaacattaaatgattactttgcaaatacagcatcaaatatcgcgataaaaggacaaatatcagaaatcacaaaagaaagccaatctcaaatattaaaagatttgacagatctaagaatgtctatttctggagtaaacaaggatgaagaacttgcaaacatgatcgaatttcaacaagcctttattgcagcaagtaaatttatcactgtttctgctgagctaatagacacagtaataaataaaatgggagta

SEQ ID NO: 16 - DNA, 753 bp, Borrelia afzelii
atgttagaaaataaaatgactggcccaaaaacactcgttgtaattgcgatcttagcaattttaacacaaggatgcaaaaaatattccattattgaaaaacaatttgattatgcaataattttctcggatgcaaccgaatatttttttgaaattcaaaaaactccattcataaaaaacaaaatattatttataaatgataaaaatttagaaattacaaaagacaagcttaaaacaacaaaaaaaatactattaacccacaaatcaaccaatgaaatactaaataacgaaattctaaaagaaaaaatttttcatctatcaaaaataaaattttctctaaaaaagtctattgatctcttacttaacggaaaatcaatagacttgcaaaaaacattactatttagagacaaatctctaaataacgaagatcttgaatacttggaaaaaaaaagccaagaaaaaaatattaatattaccctaataaacgaagcaaacatatcctatataaaaacatttattactccccaaatacaaacaataatattgttctctttaagagataataatattattttaaaaaagatatcaaattcgccttttttcaaaaatataaaatttgtattaattggcaatacaagaaaagacttaaaaattattaagctaaaatatttaatcacccttaaagaatctgatttaatgaaaatagtaaaagaagttgaaaaaaattttcaatatgaatttaatatttataaacaa

SEQ ID NO: 17 - DNA, 1083 bp, Borrelia afzelii
gtgaaaaaaaatcttatgttaatatttggcggtgtttcttttgaacatgaaatttcttgcaaatctgcttatagcgtttatttagcccttttagatttaaataaatacaatatttattctgcttatattgataagtgtacaggtatttggtatttgttagattctgtttctgatcccccaaagcctattgatacagatgttttacctattgtcagtttattaccaggttttggaattttttcaaataacaaaaatcttgagattgatgttgtttttcctgttgttcatggtagaatcggtgtagatggtgctattcaaggagttttaaaagacatggacattccatgtgttggtgctggtattatagggagtgctatttctagtaataagtatttttgtaaacttttgcttaaaagttttaatatccccatagtgccttttattgggtttaggcaatatgattattctttagataaagaggaaataaaaagaaatgtaaaggaggttttaggctaccctgttattgttaagcctgcagtattagggtcttcgattggaataaatgtagcttatagtgaaaatcagattgaatcttgtattgaggaggctttaaagtatgaccttactattgtaatagagaaatttattgaggctagagagatcgaatgttctattattggtaatgaaaagatgaaaatattttctcctggggaagttgttgtacaggattttatattttatgattatgatgctaaatattctgttattcctggaaattctattatctttaatatccctgcacatcttgagacaaatcagttgttaagcattaaggaatatgcttttcttgtttataagaatttagaactcaggggtatggcaagagttgatttttttgttgaaaaaaaatcaggaacaatttatcttaatgaaataaatactattccaggatttactgatatatctatgttttctaaaatgtgtagccatgatggtcttcagtttaaggacttgatagataatttgattgattatgcttttcaaagttatattaataggaagaaaaggattaattttaaagat

SEQ ID NO: 18 - DNA, 3201 bp, Borrelia afzelii
atgaataaaaaacgtacaaatttttcggtattattgcttttaattttcttacttatcttatcatttggaggctttggatactatatatatcaaagcaaattaaatgacaaaaatcgagaaataatgctaaacgaagttaaaaacagtgtaatagatcgaaactataaaaaagcatattctgttgcaaaacttctgcaagataaatacccgcaaaatgaagacattgcaatgcttacaaatacattagcagaaatcgccaacagtagcccttttgaatcaaacgacttacaaagagattctgcaaatcaaatcttagataagatcaaagttcaaggcaatgtaaaaacaaatgtaaacgaaaattttgatatcgcatttaataatagatacattaaagacagcacaataacagaaaactactctgacagaaacgatgacgttggtattgaagatgaagacatatctgaatttaaaaaaagcaaaatcccagaaaaaataaatcaaaatacacaaccaaaaaaagaagatcaaacaatacaacatccaaatcccaaattaaatgttaatgatcaaaaaaatttattttctttggaaaaattaaaaaaaaatttaagtgaaaactcaaacaatgaaaatattttaaacaacccccaaaaaatagaaaataatacgcaaaacacaaatttacccaaagaaaaaaattcagaacatattttaaaaaccttagacaacaataaatatttaaacaataataatgctatatctttaaaagagatgccttcaaattctaaagaagaaagtgacctttctccacccagccaaacaataataggaaaaattcataggccatatagttacttaataaaaaaagagctttacgaaatattagacaatattaatactggtagagtcacacttggaaaaaacagattaaaagaattaattaaaaagggtttaagcaataaatttcaaaaagtgaatgaattgattgaaagcttaaaaactaaagaagcctccaatttactattaaccttaataaaaaaagacattgagccaaatttaattgatataccaaaagatccttacaaaaaagacatttttcaattaaataaagaaaaagaagataatagaatacaacacttggaagaccttaaatctaaggtctattcaataaagcctggtgatcttgaaaactcaaaaacacgtcaacaagccattaaagatttaaatgaattcttgataaccaatcccaatgatgcctatgcctctaaaactttagctcaagctaataaaatacagcaattggaagaccttaaatctaaggtctattcaataaaacctggtgatcttgaaaacccaaaaacacgtcaacaagccattaaagatttaaatgaattcttgataaccaatcccaatgatgcctatgcctctaaaactttagctcaagctaataaaatacagcaattggaagaccttaaatctaaagtttattcaataaaacctggtgatcttgaaaacccaaaaacacgtcaacaagccattaaagatttaaatgaattcttgataaccaatcccaatgatgcctatgcctctaaaactttagctcaagctaataaaatacagcaattggaagaccttaaatctaaagtttattcaataaaacctggtgatcttgaaaacccaaaaacacgtcaacaagccattaaagatttaaatgaattcttgataaccaatcctaatgatacctatgcctctaaaactttagctcaagctaataaaatacagcaattggaagaccttaaatctaaagtttattcaataaaacctggtgatcttgaaaacccaaaaacacgtcaacaagccattaaagatttaaatgaattcttgataaccaatcccaatgatgcctatgcctctaaaactttagctcaagctaataaaatacagcaattggaagaccttaaatctaaagtttattcaataaaacctggtgatcttgaaaacccaaaaacacgtcaacaagccattaaagatttaaatgaattcttgataaccaatcctaatgatgcctatgcctctaaaactttagctcaagcttatgaaaacgatggagatttactaaaagcagaaagcgtatatgacaaaattaccaaactcacaaatgccaaagaagattactataaacttggaattattagatttaagcttaaaaagtatgaacactcaatagaggcatttgatcaaacaataaggctcgatccaaaacacaaaaaagcacataataacaaaggaatagctttaatactgctaaataaaaacaaacaagcaatagaatcttttgagaaagcaatacaaattgataaaaattatgacactgcctactaccaaaaaggaatagcggaagaaaaaactggcgatatgcaacaagcatttgtaagttttaaaaatgcctacgatctaaacaaaaaactcaattacgcattaaaagctggaatagtatcaaacaacctgggcaacttcaaaaaaagtgaagagtatttgggattttttaatgataatgtaaaaaaacctaacgaaattgctatttataatctatcaatagcaaaatttgagaacaataaacttgaagaatctcttgaaataataaacaaggccatcaatttaaatccagaaaaaagtgaatatttatatttaaaagcatccataaatcttaaaaacgaaaattatcaaaatgctataccactttacaacttggtaattgaaaaaaaccctgaaaatatttcagcttacataaacctagcaaaagcatacgaaaaatcgggaaataaaactcaagcaatctcaactcttgaaaagataataaacaaaaacaataaattagccttaaacaatcttggaatactttacaaaaaccaaaaaaattatcaaaaagcaattgaaatttttgaaaaagcaataatcaattcagatattgaagcaaaatataatcttgcaaccactctaattgaaattaatgataatacaagagctaaagaccttctaaaggaatatacaaaattaaaaccaaacaatccagaagccttatatgcactcggaataatagaatataatgagaacaataatgatcaaacattaagggaacttattaaaaaatttccaaattataaaaaaaatggaaatattaaaaaaataataggaata

SEQ ID NO: 19 - DNA, 840 bp, Borrelia afzelii
ttgatgaaaaaatttattatcttaatttttatgctatcaacaagtttattatacaactgtaaaaatcaagacaatgaaaaaattgtatcaattgggggatctacaactgtaagtccaatactagacgaaatgattctaaaatataataaaataaacaataatactaaagtaacatacgatgcacaaggaagtagtgttggcataaacggactatttaataaaatatataaaatagccatatcatcaagagatttaacaaaagaagaaatcgaacaaggcgcaaaagaaactgtattcgcttatgatgctttaatttttatcacaagccctgaaataaaaattacaaatattacagaagaaaatctagctaaaatactaaatggaaaaattcaaaattggaaacaagtgggagggcctgatgctaaaatcaactttattaatcgagattcttcctctggctcttattcgtctataaaagatctacttcttaataaaatatttaaaactcacgaagaatctcaatttagacaagatggaatagtagtaaaatctaatggagaggtaattgaaaaaacaagccttactccacactcaataggatatataggtcttggatacgcaaaaaattcaatagaaaagggtttaaatatactttctgtcaacagcacataccctacaaaagaaacaataaatagcgataaatacactattaaaagaaatttggtaatagttacaaatagcaaatacgaggataaaaacgcaactcaatttattgattttatgacaagctcaaccggacaagatattgttgaagaacaaggttttttagggataaaaaaa

SEQ ID NO: 20 - DNA, 1224 bp, Borrelia afzelii
atgaaggttatgcaggatcctaggctttctaagtataaaaatactaaaaatttaagcaaaaaaaccgttgaagaaattgatactttgagcttaaataaaaatttttccgattcagagattcaaggttctatgcttagatcttggataaatcttattaagggtaataaaaataaaacacctattgagtttaaatccaataatattaatgatttaaagccagggtttattcgcaaagagagtaaggttacaaagattgcaaaatattttttggctattgggcttgaaaaatctgcaaagattatgtctgagcttgatgattcggatataatcttaattatttgtgtagtttttaagattaattacattgctccagaagaaaaagatcgtattattaaagaatttgaagagttgctaagaaatgaaaaaaggtatgttaaagttgataataactttgcttatgatttattgaataaaacgttaggaaaatctaaagcaaaatcaatttataaaaaagttactggcaatgatatttttattccttttgattatttatctcaaattgagcatgaacaactttgggcattaattaaagatgataatattaaaacgcttgtcatattatataattatttaaataaagatcaaaaaaagtatgttttttcaatgctaggagaagaaaagagaagagaattcgtaaaagatcttgctaaagcaaggcaattaagcatggagacaatagaggcaatttcaaataaacttaaggataggtttaagatgcaagggagacttaagacagataaacttgacggatctaaaatatttgttgatattttaagctatatggattctaatgaagagaaaaatctgcttaataaaattaatatgcaggatttaaatcctgctgtggacaatgaaattcgagaaaaaatatttgatatcaatgtaatattgagaataatggataatgatttgcataatattttaagagagtttacagacaaagagattgcaattattattaaagataaaactgatgaggttagagataaaatgctttcaaatgtttcaaaaaggcgcaaagaaattattttagatgaggaagcttttttaggaaaaataagccaaaaagatttaaaaaccatgacactattttttattaattatattaaaaatttaactttaaaaggcgatttgacaatatatagaaaaaatgaggaatttatt

SEQ ID NO: 21 - DNA, 2004 bp, Borrelia afzelii
atgttgatttttggttttgttggtttgtttttttttaatttttttaatttacatgctcaaggaatagttaccaataaagatgctcaagaagagtttaaatgggctcttaattcctataataatggaatttatgatgatgctcttttatcttttaaaaaaattttaagctttgatcctaataaccttgattatcatttttgggctggcaatgtttattatagactaggttatgttgaagaagctttaatggaatggagaaatttaaaagatcagggttataaggtcccttatcttaggcatttaatttctactattgagcaaaggagaggtattttttcaaattatgagcttaagtttaaaaaacttgtaaaagttgcttctcttgataattctatttataaaaggccacatgggtatcagattacatctttgagggctgataagtatggtggatattatgctgcaaactttgtaggtaatgaaatattgtattttgatgttaataataatgttaatgctttagttaaagatggatttagttatttaaaatcaccttatgatgttattgaagctaatgatttgctttatgtgactctttattccagtgatgaaattggtgtttacgataaagttcttggagttaaaaggagatctattggaaaaaaaggcacaaaagatggtgaattgcttgctcctcagtatatggctattgataagagaaattatatttatgtgagtgagtggggaaataaaagagttagtaaatttggacttgagggtgattttattttgcattttggttatagaacttcgggctacaagggtcttttaggccccacaggcgttacttatttgaatgaaaacatttatgttgcagattccctgagaaatactattgaagtttttgacactagtggcaatcatttgtattcagtttttacttctattgaaggaatagaggggcttagtagtgattctgttggaaacaatgttatagtatcttcaaaagatggtgtttataagtacaatattgctaaaaagacaattacaaaaattttaaaagcagataaattgaattctaaaatttcttcatctattttggatgccaataatcagatgattgtctcagattttaataatgccaaggtttcagtttacaagagtgattcaagtctttatgacagtttaaatgttgatgttagaagaatagttagacttggggggcctaaaatttatgttgagcttaatgttagcagtaaaagcgggttaccggttgttgggcttaagagtgaaaatttttcaattgcaaatgaaaattattacattgttaatcccaaggtagcgtacaatgtaaatgcttcaaaagatattaatatagcagttgtttttgataaatcttcttatatgaaaaattatgatttagatcaaatcatgggtttaaatactttaatagagtcgtcaaaaaataaaaactttagttttataaatgcaacaaatgtgcccattatagataatattgaaagcttgacaaatagcattaaaaacacaagttctcttggtccttatagtacagatactgtaaaaacagatgttagtttgaagttagcaggttctggacttatgtcaaaaagctcaagaagagcagtagtttattttagtggtggtgttttaaatcgtaaagcttttgaaaagtactctttagatacaatagtaagctattataaaaataatgatataagattttacttaatattatttggcaacggtcttgttgatagtaagcttcaatatttagttgatgaaacaggcggtgctataattcctttttcatcttatgaaggagtgtctaaagtttatgatttaattttagaacaaaaaacgggtacttatttgttagaatattattatccaggccctcaagagcccaataaatattttaatttatctgttgaagcaaatatcaatcaacagactggaagaggggagtttgcatattttattaat

SEQ ID NO: 22 - DNA, 771 bp, Borrelia afzelii
atgaagagattatttcttctgtattttttatgttcttttgtttttttgaatttgtttgcccaaggcaattcttcttatgttgataagcaaaaagagcttgctattttttattatgaggttggtcaaaggtatataaatgttggtaaaattaaaaaggggaagcttttccaagcaaaagctttaaagatttatccagatttgaaaaagggagttgatatcaagcttgcagttaaggagctggatgctaggattaaggatggcaattccaaggttgttatgcttgaggatgttaagcttgaggagatacctggaatagtgcacgaaaaaatagaaatcaatgattttacaaatgctcctaaaatagaatatattgctcaaagagagagaagtaaaaatcaagataaaattattaaattccaatttggaaagtttgcaagagctttaatttctcagaactttgatttatttgactctgttattgcaaataaggttaatgttatgggtcaatttgaatcaaaaaatgattttatatcagctttatcaagagcttcatctaaggttgatgcggatgagctagagtatttgtcagttgatgattattacgatttaaagtctttgaaaatttcaaaatctaacgatacttcttttgctgttaatgtaaatgccaagaaaaacgatgttactaaaaatttctcattttggaaagaacatcagactttgatttttaccaaagaggatgataatgacaattggtttttgtcttctataaag

SEQ ID NO: 23 - DNA, 1326 bp, Borrelia afzelii
atgatgaggtctttatattctggtgtttctgggcttcagaatcatcaaacaagaatggatgttgttggtaataacattgcgaatgtaaatacaattggttttaaaaaaggaagagtaaattttcaggatatgatatcacagtctatttcgggagcctctcgtcctactgatgttcgtggtggtactaatcctaagcaagttggattaggaatgaatgttgctgcaattgatactattcatacccaaggagcttttcaaagtactcaaaaagcatctgatcttggagttagtggtaatgggttttttattttaaaagaaggtggaaatttgttttatacaagagctggtgcttttgatgtggattctgatcgacatcttgtaaatcctgcaaatggaatgcgaattcaaggctggatggcaagagatttagaaggggaaaaagttataaatacagcttctgatattgaggatttaataattccaatcggagataaagagggagcaaaatctactaaaaacgttacttttgcttgtaatcttgataagagattgcctgtaattcaagaaggtgcaagttcggcagatattgcacgtggaacttgggttgtaaataagtcattgtatgacagctttggaaatgttagtgttcttgagcttagggttgtaaaggatccaaatactcccaatttatggaatgcaacagtgttaataaatggtgagcaaaattcaaatttcacacttgggtttgacaatgaaggagcattagcgtctttaaatgggcagccaagtcaaaaaggagatgttcttcaaatccctataacatttaatgttttaggtgcaaatgtaggtgaagttggtgaacagcaaactgtaaatttgaaattgggaacagttggaagctatactgattcaatcactcagtttgctgatgctagtagcacaaaggctattattcaagatggatatggcatgggatatatggaaaattatgaaattgatcaaaatggtatcatagttggcatttattcaaatggcataaggcgagatcttggcaagattgctcttgcttcttttatgaatcctggaggacttgcaaaatcaggcgatactaattttgtagaaacaagtaattcaggtcaagcgagaataggtgagaccggacttgctggacttggtgatattagatctggtgttttagaaatggctaatgttgatcttgcagagcagtttacagatatgattgtgactcaaagaggatttcaggcaaatgctaagaccattactacttctgatcaattattgcaagaacttgtaagattgaaaaat

SEQ ID NO: 24 - DNA, 1365 bp, Borrelia afzelii
ttgtgcttgaggagattgaaaatgaataaattagaagagcattatatagttcctaaagatgtagttgcagaacttgataagtacataataggtcaagacgaagctaaaaaattagtatcgattgctcttgttaatagatatataaggtctaggcttccaaaagaaataaaagatgaagtaatgcctaaaaacattattatgattgggtcaaccggcattggaaagactgagattgcaagaagactttctaagttaattaaagctccttttattaaagttgaggctacaaaatataccgaggttggttatgttggtcgtgatgttgaatctatggttagagatttgatgggcattgcagttaatatggtaaaagaagagatgtatagtactgtaagagaagatgctttgataaaaacagaggagagaatagttgagagtctttttaaaggatctggcaattctgagaatatagatccaaatgaaataaaggcagaagaaaaggtaaaagagaagcttagaaaaaaacttagagcaggtgagcttgatgatactactattgaaatacaaatttctagtaaaatgccattttccacaatagaaatatttacaggtggtaattttgaagagattgatatgggaattggtggtttattaggcaatatatttgataggaaaaagaaaagagaattgaagattaaaaaggctaaggaaataattttagcagaagaacttgaaaaattagttgatcacgaaaatatttcagatattgcaaaatctaaagtcgaaaatatggggattatttttattgacgagattgataaaatagctgctaagaataggagcggtaatgatgtatctagagaaggcgttcaaagagatattttgccaattattgaaggttccaaagttaatacaaaatatggaatagttgatacttctcatattttgtttattgcagcaggagcatttaatttagccaaaccctctgatttaatacccgagcttcaaggaagatttccaattaaggttgagcttaagagtttaagcatagacgatttgaaaaaaattttaaaacaaacaaaaaattctttaataaagcaatatgttgctatgtttaaggtttataatttggatttaaagtttagcgaagaggctatagatagaattgcagagcttacttttaatatgaatcttgagaatgaaaatcttggcgcaagaagacttcacggcgttatggaaagagtgcttgcagatcttttttttgaggtgcctggtagtaagttgaaaaaatttgaaataaacttggactatgttaataaaaaaatacaaattaacgaacaaaaagatttaaattattatataatt

SEQ ID NO: 25 - DNA, 681 bp, Borrelia afzelii
atgaaaaaaacaataataatagcgcttttatatgggttgatcacaaatatttaccctacaataacatcaacattaaaaccagatgaacaaacaaacgaatatacaatagaaaaactttatcaaaaagcaatgatgctaaaaaaatcaaaaaaatacaacaaagctatagcaaatctaaaaaaaataattaacatggatcaaaatcaagttgatgctcatcttttactctcagaattagaatatttaaataaaaactggaaaaaagcaattattaaatctcaagattatttaaaaataatagactttaaagataaaaaaaactttttagatatatcttgggcatattttttaataggagaagttgaaaattcaatggactacataattaaatttttccaaagcggtaaagaattgttcaaagaaaatatatttatagcaattgatgctctttttaaaaaaagtatttatcattttataaacaatgaagatgtagcatttaatataatattaacctcaacattccaattagcacttaatgacgacactttatttataatttttttaaataatttagaaataataaaacaaatacctttttattattttaatagaaaaaaaattaaagaattgtatctgcaaattaataccctaaaaacaatccaaaacacaagttgtagaact

SEQ ID NO: 26 - DNA, 1137 bp, Borrelia afzelii
atgaatataaagaataaattaatattgatgctgcgcattgtggtgacaatctctcttatcgcatgcaaaacgcctccggaagcaagagagagcaaaaatgctaaaattgcacaaccaaataatgaaatttttcaattaagagatctaaaagacattaaaaatgaactaataagagaaagggggcatcttttttattctaaagagtttaatgaagctgaacgattagaagaagcaatgaagcaaaatttttctaaaaaaaaggcaaaagaaggaaatgaaattgcactaaaagtgcttgaaagatacaaaacaataataaaagaaacaaaagaaaaaaaagaaaaaacaaattaccttaaagaaaatattgaaaagtatctaaacgatgcagaagcaaatgaggcttatatatggattccactggaaatcgacgaagtaaataacttatattttgaggcaacaagaaaatataaaaattacgatcttgacaatgcccttgacatgtatagcaaagcattcaacagagcacaacaagcagcaaaaaatgctaaagaagctaaagccttaaaagaaactgatgagagaatgtataaacaattaaaagcgcttgaagctgcttccaatttaccagtttatagtaataataagcttatcaagccatcaccatggaatggtagagcatttattaaagagagaaacggtcacttaaaccttttaaatattaatgcagaagatacttatttccttggagaaacaaaaacttcaactccaatagtactcgcatatgaagaaaagatggaaatagcaaaaacttctaaccctcaagaacaattcaaaacactagaacttattgaacaatctagaaaattgtgggaaaaaggagttgaggctaaaaatgtcaaaaactttagacttgccaatgaattatttttagaatctgcaagatacctagaagcttatcagagcaacgcaagcagtgagctttatgtaataaaaataggtaatactttgtggggaatttctaaaaaattatacaacgatccttacttatggccaaaaatttggtttgctaacagacaaaaaatacaaaatccagacctgattcattctaactggaaaataataattcctgctaaa

SEQ ID NO: 27 - DNA, 1581 bp, Borrelia afzelii
atgaaattacaaaagttattatttttaataatattttttctaacttttctttgttgtaataaagaggaaaaaaaagaaggagtatcatttaaaataagcctgggagcagaaccaagtagtcttgacccccaattagcagaagacaatgtcggatcaaaaatgatagacacaatgtttaaagggcttattacaggcgatcctaacacaggaggaaacaaaccaggacttgcaaaaagttgggatatttctcctgacggaacagtttacacatttaccctaagagaaaaaatcatctggagtgatggagttgcaatcactgcagaagggattagaaaatcttatcttagaattttaaataaagaaactggctcaaattattctgaaatggttaaatcaaccattaagaatggtcaaaaatattttgacggacaagtgtctgactctgaacttggaattagggcaattgacgaaaaaacattagaaataacactcgaatcaccaaaaccctattttatcgatatgttagtacaccaatcatttattccaataccgattcatattgccgaaaagtatggacaaagctggacaaaccctgagaacatagttaccagcggtccttttaagttaaaagaaagaattcctaacgaaaaatatgtggtcgaaaaaaatgataagtactataactcaaaccaagtagaagtacaagaaattacattttatacaacaaatgataactcaacagcatataaaatgtatgaaaatggggaattagatgcaatctttggcgctatacctcccgatttaattaaagatctaaagttaagaagtgattattactcatcagctgttaatgctttatatttttacgcattcaacacgcacattaaaccactagataatgttaaagttagaaaagccttgactcttgctattgatagagaaacgcttacctataaagttcttgacgatgggactactcctacaagaagaataacccctaacttcagctcatattcttatgcaaaaaatttggaattatttaatcctgaaattgcaaaaacccttctagctgaagctggttaccctaatggcaatggatttcctattttaaaattaaaatataatacaagtgaagctcataaaaaaatttgtgaatttattcaaaaccaatggaaaaaaattttaaacattgatgtggaacttgaaaacgaagaatggacaacttacttaaacactaagtcaaatggaaattacgaaatagcaagagcagggtggataggcgattatgctgatcctttaacatttttaagtatattcacacaaggatacacacaattctcatctcacaattactcaagcccagaatacaacgaacttattaaaaagtctgatcttgaacttgatccaataaaaagacaagatatcctaagaaaagcagaagagataattattgaaaaagattttccaatagccccaatatatatatatggaaatagttatcttttcagaaatgacaagtggacagggtggaataccaatattacagaaagatttgatttatctcaactaaaattaaaaaaa

SEQ ID NO: 28 - DNA, 1623 bp, Borrelia afzelii
atgaattttaataaaactacaaaaatcaatacaaaacttaagctagcaacactaattatacttgccatatctttaattacatgcaacaacaattcggaaaaggaaaaattaacatttaaagtatacatagggggagcaccttcatcacttgatccacacttggtagatgagacaatcggagcaagaattttagaacaagtattctcggggctcttatcattaaatactaaaacaggaaagctaatgcctggacttgctaaaaattgggaagcctcaaaagataaaaaaacatatcaattttacctaagagacaaccttgtttggagcgacggggtttcaatcactgctgaagggataagaaaatcttttttaagaattttaaataaaacaacagaatctgcacatgttgacatgcttaaatcaataataaaaaatgggcaagagtattttgatggaaaagtatctgattctgagcttggaattaaagcaattgatagcaaaacattagaaataacacttacatctccaaaaccctattttcttgaattgctcctacatcatgcattcatgccagtacctattcatgttattgaaaaatataaaggaaattggacaaatcctgaaaacatggttaccagtggtccttttaaattaaaaaaaagattacctaatgaaaaaattatatttgaaaaaaatgaacactattacaatgcaaaagaagtagaacttgaagagcttgtctacattacatctgacaatgatctgactgtatacaatatgtacaaaaataacgaaattgatgctatttttaacagcatcccgccggacattgtaaatgaaataaaactacaaaatgactattatcaacacaaaagtaatgcaatttatttatactcatttaatacaaaaataaaaccccttgatgatgctagagttagagaagctttaacgttagctattgacagagaaactttaacttacaaggtactcaatgacggtacagttcctacaagagaaataactcctgatcttgaaaattacaattatggtaaaaaattagctttatttgatcctgaaaaatctaaaaagcttttaacacaagctggatatcctaatggaaaaggatttccaatgctaacgctaaaatacaatacgaatgaaactcataaaaaaattgctgcatttattcaaaaccaatggaaaaaaattttaaatataaatattatgcttaccaatgaaaattggcctgttcttactaatagtagaaatacaggcaattttgaaataataagaattggacgcattggggaatatttagatccacacacatacttcactatattcacaagcgaaaattcgcaacttgcatcatacagatattcaaacctagaatttgataaactgattagagaatcggattttgaaaaagaccctataaaaagaaaaaaaatacttagaaaagcagaatcaataataattgaaaaagattttcctgccgcaccaatatacatatattctggacactatcttttcagaaacgacaaatggactggatggagtcccaatgtatcagaggtttattatttttctgaattaaaatcaattaagaatgcaaaacacaac

SEQ ID NO: 29 - DNA, 1197 bp, Borrelia afzelii
atggaaggaaatgattttattaaatttgggagttatttgagaaaagttagaaatgataaaaatttaactcttgaaatggtagctgatgatattaaaatttctgttaagtatcttaaagctcttgaagattctaatattgaaattttcccaaatgaagttttggctgttggatttttaaggacttatagcgaatatttagatattgattctagattaatatcgacactttttaaagattataaaaatagacttaatagcagttatatcgggattagatctgaagataaaatttcaaatttaggcttttcaagtgataaaaaagtcccagataaaaaaatatttttttttagtttagagtctttaagtatgttaaaaatccttttaggaatcgctggcgttattttgctattatttatgtttattgcttttagagaagtgaaagtttattttaaaaaattttttaagcttagccgggatgagaagaaaatttctaatattcatgaagtgtcttttgataaaaagaatttttggaatctttctcttagcgaaggagattttttatctttaacatatggtaataatatcgcaaaatatagaacatcgtttattagtgatgatttggttattgttgatgagtctaaaaaaaataaaaatatttttaatttgggagagtttaaagagataaatcttgatgataatttgagagtcaaaattatttatgagaattattattatgataagtcgaaaatagcccatgtaagtttagagtcttttgctttaaatgttaaatatgtgtctgaaactaatattgacaatagatttaatattttaaattggcagtttgatgttaagggaactgaaaaattgccaagtagtgattatcttaccctatattcttctcaaaaactttcaaatgttgatttgaaaattgattttttaaatgatacattttttagatatgctgatgaaaacaatcttcatggcaagtctttttttgcatccaaaggaattcccattaatttagcttttgaaaaatctttaatactatttttttcaagactttctgatgttaatattattctcaatgacagaaacattacttcttttttaaaagagcagggaaaagaaatttttgctgtccaattcttttgggtaaagacaccttcagggtttgatcttaaggtttctgaagtttat

SEQ ID NO: 30 - DNA, 1416 bp, Borrelia afzelii
atgtctttgaattacgttgaaataaatactttgattaaagaaatccctttcacaaactctttaattaaaaaaataatacaaccggattataaaagtttgattttagagatttacaataaaattgaaaataaaaaattaaaaatattaatctctttaaatccaagcactactagattccatataacaaaaaaaaatttcaaaaagaataccttaaaattaagattttctgaattcttaaaatcaaaaattcaaaatggaaaaattataaaagctttccaaatgaaaaatgaaagaatcatttctcttgagattttaaaaaaggacataattatcttatttattaaattgtggccatcttctccaaatataatagctacaaaccaaaactttaaaatactagatgcttattacagaagaccaaaaataaaagaaacaacgggtgaaatctttttaaaagctaaagaaatacatgaaagcaataaaatgtctgataaaaaaataatgggcctaaaagaagaatacaataacgccagtcacacatcttattctgaatttcttgaaaattactacgaatcgctcagcaatcaaattaaagaaaccaatataaaagaattacttattgaaaaatataaaaaagagttaattgttttagaaaaaagaatagaatctttaaaacaacaaatcaaactaattgaaaacattgaaaatgaacgggaaaaaggtgagttaattttattaaatattaacaaaatacaaaaaggacttaaagaaatagacctcttaaattataaagaagaaaaaataaaaatatcgttaaatcaatcattatcaccaaaagaaaatgccttacaatattttaaagcatataaaaaaggcaaaagttcatttaataccatacaaaatcaattaaaagataatctggataaattcaatcttattcaatcaaaaataaccatgttaaaggtcgaaaatttcattaccaaagaagaatataatcaagaagaaactgccattaaaaaaaaagaaaaaacgtcaaaaataggattgcatttcacctcttatggatttgaaattattattggaagaaacgcaaaagaaaacgatgaacttttaagacattgcgttaaaggaaatgactattggcttcatacaagagattatcctggagcttatgtttttattaaaagtcaaaaaaataaaactccttgccttgatgtacttttagctgctggtaatttatgcgtattttatacaaaattagcaaaaaaatcaggaaaagcggatctttactacactcaagttaaaaatttaagaagagttaaaaatggaaagctaggtcttgtaattccaaaagcagaaaaaaatttacatattaagttagatgaaaatctaataaaaaaaataaaaaataaaacc

SEQ ID NO: 31 - DNA, 1797 bp, Borrelia afzelii
atgaaaagagaaatatatgcatttttgagcaactttattgtttttttatgtttttttctaagtttaatctttagttattcttatttttttggagaaaattttttagaaaagcatagattaatagcggctttttttgattctattttggttttttataagtatttttatgggttttttatttttattgtttgcatttattttgctttttttgttcagcaagaaataaagatttatttaaaatcgtataatgggtatttattttctagactttatacatttttactagtattttttattataggacttttttttacctttatatttaatttaatattgccttatataattgcccagagaaatgagtataagtttagttacgatagatataatcttcttgaaagtgaagcaaataaaatatctcttaaaattaaaaatatagatataagtttatcttcaaatagattttttttatcttctgatttgtcagattctatgaagcaaaagagaaaacatcttgaaaatttgattagaatatatgataaaatgcgaattatttatgtaaataatgaagaacttttaacaaactactatttagtaaaatctgaatacagtaaaattccaagctatgacgttgatttagaaaaggttaagaaaactttttcacgatatcctttacaaagccttaaaaagcaagatttttttaatattgtcaatgaatttatttctcaagccgattattatacagctaattattttgcttatattgcttatgttgcaacaaaagatgatagttttgtttcgcttttaaatttgactttaaagtttattaatgaaaacaggaattttgaaaaagaaaaaatgcagttgatttccgaagaaaagcaaaaaaattttttatatcttaatactgaaaaatttaaattagcttattacggtttttcaaaacttcataaactattgcctagtgataatgaaattttgaattataaaaataaatcgcttgaaaagctgagaaaaagatatcttttttttgatgagattgaaaaatattttgaatatttcggaataaacgatgtattgttgttgcaaccagattctaagagaggtttttatgattatatttatatgcaaaaagttgtcacccttaataattattctaaaataataaaaaattttgaacttattagatttaataacacaggaaatgttattttgcatattaaaattccgtttgctaccttaagaggtaattttgtgtatcaaaatgttttagacaaagataatgagcagagcgaaattactcttaccaaagtctttgtgtctaaggatagttttgatacaaacgttttagaggttgtcaagattaatgaaaatgtagaaaatttagctttattttcaaattttactgaggttggattttttttaaaaattcaaagtttgtcaagcgcttttcataaggttactatattaaatttgaaattaattaatattttttccttaactttagttttactcatttctcctattttgctagttttaatgggagcattttttgtttctttgttttctaaaatagaatttaatttcaattctaaggttatgattgttttagtctcattaatgatagctgtcttctctgggattgcttgtctttttgtaaattattttttaattatttttacctctcttcttatatatgtttttaatagtgtgtacatatctttggctatcctttctgtgttattaggttttcttattttcaaaataattattttaaattataaggaaaggcatatt

SEQ ID NO: 32 - DNA, 1428 bp, Borrelia afzelii
atgaaaaataaatttttaataggcgtgtattttttattgactttaggtataagctctctagtaattgttgaatctatttttgcttttgatgaatctaataataataagttatcaagatctagttatgagcagatgatgattcaggcttttgaatttgtaaaagaaaattatgttgatcctgtaagcgatgaagtgatttttgaaggtgctttaaaaggaatatttcaagctttgaatgatccttattctcaatatttgacaaaaaaggatttagaagagatttcgaaaacaacagtgggagattatgtcggtattggaatttctataataaaaaaaatgcattctcaagataagcaagacaaggcaaaagatcttgatcctaatagcgcttgcgtttctattgttacgccttttgaaggaggtccggcttataaggctggaattaaatctggagattgtattaccgctgttgatggcaagagcgtttcttctatggaggtagatcaagttgttgatcttttaaagggtaaagagggtacaaaagttaaagtgtctattcttaggggcaaaaatttaacattggattttgaacttacaagagagaagatagaaatacaaacaatcaagtatgatgttattaatccagatattggttatgtaagaatagtaagctttaatccgcacacttctgcagattttagtaaagctttagataatctcaagaataggaatattaaatctttgattttagatttaagacttaatactgggggatattttcaggcagctataaaaatggcggatgatattttatctaaagggactattgtttctacaaagtcaagaaattctagcaagcctgttgattataaagcaagctcaaaacaagttttaccctcagatataaaaattgttgctttaatagataaatcatcagcatcagcctcagaggtttttgtaggggccttaaaagacaataaaagagcctatattataggcgaaaagtcttatggcaagggacttattcagcatgtagttcctttttatactggtggctttaaaattacaagttcaaagtattatactccatctggaaagagtattcataaaattgggattgagcctgatttggaaataaaatccccagatttttctgaagaggaagcattaatatataaagaaatttttgataaaaagctagtagaaggctttttgaagggtaaaaaatctattactgaacaagagattgatttttttgttgaaaatcttgttaaagaaaatccaaaatataaaattgataaagaatttttaggcaagtatgtgttttttaattattatcaagataataataaagaactgccaatttataatctacattatgacaaggctttaaaagcggcttgtgaatatttatctaaattaggtaat

SEQ ID NO: 33 - DNA, 1374 bp, Borrelia afzelii
atgaaaaagcaaaatccatggatatctttaagcgaagaagaaaaaaatcaaattttcaatttttccgaaaattacaaaaaatttataagtaaatttaaaacagaaagagaagttgcatcctatgccctagataaagcaaaaaaaaagggatttcttaacgctgaagagaaaaaaaatttaatgccgggcgataaaattttttatacctgtagagaaaaaactgttgcttttgctattattggcaaaaatcctattgaaaatggaatgaacttaattgtctctcacacagattcaccaagacttgatgcaaaaccttcgccaatctctgaagagaacgagcttgtatttcttaaaactaactattatgggggaataaaaaagtatcagtggttatctacacccctttcaataagaggtgtgatattcttaaaaaatggagaaaaggttgaaattaatattggtgataatgaaaacgatcctgtatttataattcctgacattttgccccatcttgatagaaaaatacaaaggaataaaaaatcagatgaaattattgaaggggaaaatctaaaaattttaattggaagccttccaatcgaaacaaaagaaaaaaataaagttaaactagcaactctacaattaataaaagaaaaatataaaatagaagaagaagattttgtatcatcagaaattgaaatagtacccgcaggaacagcaaaagacgttggatttgacaaagctttaattggtgcttatggacaagatgacaaaatatgcgtctacacttcactagaatccatatttgatcttgaagagattccaaacaaaacagctatttgctttcttgtggataaagaagaaattggttcaacaggttcaactggattagactcaagatatcttgaatattttgtttctgatatgatctttaaaattaaaaaatcagaatacaataatcttcacgtccaaaaagctttatggaattcaaaaagcatttctgctgatgtttgtgcagcaataaacccactatttagctcagttcatgacgaacaaaatgctcccaaacttggttatggtatacccataatgaaatacacaggacatggtggaaaaagcatggccagcgatgctgatgctgagcttgtttcttatattagacaattattaaataaaaacaatatagcctggcaagtagcaacacttggaaaagtagaagaagggggaggaggaactgttgctaaattcttagctggctatggaataagaacaatagatatgggaccagctgttataagcatgcattctccaatggaaataacttccaaatttgatttatacaatgcttacttggcatacaaagctttctacaaagaa

SEQ ID NO: 34 - DNA, 1053 bp, Borrelia afzelii
ttgaatggtggaaatggagaagcgttttatatgaggattgcaatttttatatttggaattttgttaacttcttgctttagcaagaatggaatagagtctggttcaagtaaaattaagatatctatgttggtagatggtgttcttgatgataaatcttttaattctagtgctaatgaggctttattgcgtttgaaaaaagattttccagaaaatattgaaaaagttttttctagtgctgtttctggagtttattctagctatgtttcagatcttgataatttgaaaatgaatggctcaggattgatttggcttgtagggtatatgcttgcggacgtttctttatcggtttcattggaaaatccagaaattaactatgggataatagatcctatttatggcgacgatgttcagattcctaaaaatttaattggtgttgtttttagaatagagcaaggtgcttttttagctggctatattgcagctaaaaaaagcgtttctagtaaaataggttttataggtggagtaaagggcgatatagtagatgcatttcgttatggttatgaggctggtgcaaagtatgctaataaaggtatagagattgtaagtgaatactctaattctttttctgatattgatattgctagagttatggctaataaaatgtattctaaaggaatagatataattcattttgcagctggtttggcaggagttggtgttattgaggcagcaaaagaacttggtgatggttactatgttattggagctgatcaagatcagtctcatcttgctcctaaaaattttattacttctgttataaaaaacgttggtgatgcattgtatttgattactagcgaatctcttaaaaatgataatgtttgggaaggtggaaaaattgttcaaatgggattaagagatggtgttgttggtttatctaatgcaaatgaatttgaatacataaaagatcttgaaaggcaaataattaataaagagattattgttccttgcaatcaggaaggatatgaaatttttataaaaccaatattaaagtta

SEQ ID NO: 35 - DNA, 4131 bp, Borrelia afzelii
atgaaagagataaaagattttgaaaaaataaaaattaaaatagcatctcctgatcaaattagaaattggtcttatggagaggttaaaaagtctgaaactattaattatagaactttgagacccgagaaggatgggcttttttgtgagaggatttttggtactacaaaggaatgggaatgttattgtggtaaatttaaatcagttagatataaaggcattatttgcgatcgttgtaatgtagaggttacccattttaaggtgaggcgtgagagaatggggcatattgagttagcagctccagttgctcatatttggtattataaatatatcccctctaggattggtcttttgcttgacattacggcatctagtttgaattctattctgtattatgaaaaatatgtggtaattgaaccgggtgatactgatcttaaaaaaatgcagcttttaaatgaagatgagtacatagaggctagagagcgatatgggatgtcttttaatgcttctatgggagctgaagctattaaaagtcttcttgaaaatcttgatcttgatgagctttcatctaagcttagaattcaaatgatagataaagatgataaaactgataagaaactcttaagacgtcttgaaattattgaaaattttaaaatttctggaaataaaccagaatggatgattatggaagttctccctgttatacccccagagattaggccaatggttcagcttgatggaggacgctttgcaacatctgatcttaatgatctttacagaagagttataaataggaataatcgcttaaggaagttgcttcttcttaatgcgccagagattattgtgagaaatgaaaaaagaatgcttcaagaatcggtagactctctttttgacaattctcataaaagaaaggttgttaaaggctcatctagtaggcctcttaagtcgctttccgatgcgttaaaaggtaagcagggaaggtttaggcaaaatcttcttggtaaaagagtagattattctggtcgttctgtgattgttgttggacctgagttaaaactacatcaatgtggattgcctgcgaaaatggctcttgagctgtttaagccttttgtgataagaaggttgattgagagtgaagctgtttttaatattaaaagagcaaagaatttgatcgaacaagaagttgacgaggtatggcaaattttagatcttgttattaaagagcatcctattcttttaaatagggcacctacccttcatagacttggaattcaagcttttgagcctgtgttagttgagggtaaggcaataaaattacatcctcttgtttgtcatgcatataatgctgattttgatggtgatcaaatggcagtacatgtacctcttactccatcagcacaagctgaaagttgggctttaatgctttcaacaaataatcttttaaatcccgctaatgggcatcctattgtttttccatcccaagatattgttttaggtctatattatttaacaatggaaaaaaagaatactgttggagaaggtaaaaagtttttaaactttaataatgttattcttgctataaataataggagtctagattacaatgcttctatttatgtaaaaattgatggcaaatataaaaaaactacagctggtagggttatatttaatgaggccttgcccaacggaattgaatttgtaaataaaactcttagtgatttggaactacaaattttaatatcaaaagtttatgtagttcatggttcttctactgtaattgaaatgcttgacattatcaaggagcttggctttaaatatgctaccaagtttggatgcacaattagtatgagtgatattattgttcctgatgaaaagaaagcttatatagacagggccaataaagagattgctaaaattcaaaatgattatgctaaaggtgttattaccggtgaagagcgttataataacgtagtttctgtttggttaaatacgaacgaggaacttactaataagatgatggaaattttaaagaaagacagagatgggtttaatgttatatatatgatggcagattctggtgctaggggtagtagaaatcaaataaggcaacttgctggcatgagaggattgatggcaaaaacttctggggatattattgagcttccaattatttctaactttaaagaaggtctttctgtgatagagtttttcatctctacaaatggagcgagaaaggggctggcagatactgctcttaagactgctgatgctggatatttaactcgaagattagtagatattgctcaagatgttgttgttagaatagaagattgtgggactataaacggaataaaagttgaaactgtaaaaaatggtgaagaaatattagaatctttgaaagaaaaagctgttgggagctattctattgaaagaataaaaaatccaattactggtgagattgttttagatgcaaatgaagaaatctcagaagctaaaatagaattattagaaaaaattggtattgaaaaacttgtgattagatctgttttaacatgtgaagctgaacacggtgtttgtcaaaaatgttatggtagagacttttcaaagaataagcctgttaacattggcgaggctgtaggaataattgctgctcagtctataggtcagccaggcactcaattaactatgagaacttttcatattggtggagttgctcaggctggtagtgaggatgataaaatatctttaaagaatacttttatacttaatggcatagagggttttaatgttagggttgagaatggaattcttttcacaagaaaaggaactttaaaaataatcaatgttttttatgaagaaaaaattaagaacataaaggaaattaaagtttcagattctcaaagagtaattaaaggaattcctttatttgttaataataagggagtagaaattctctcttcttatattggttatgttaaattaagagacgataaatttttaatagtgtcagaagagcaagaagttttcttgaaagctggtacaaagcttgaaatagaggttggcgaatatgttgaatcgggcaaagttattggtacgtttgatccatttgcagagcctattattgcagaggttaaaggtaaaattaaatttaaggatattattttaggaactactcttaaagaagagataaatactgaaacaggtaatgttgagaaaagaattacagataatgtttttgaatctcttgatcctagaatttttattattgatagtggtggtgtggagatcgcatcttatgtattaccaggcgatgcttatcttcaagttgaagatggtcagaatattaatataggagatattattgcgaaactttctaaaggttctgaaaaaactcaagatattacagggggattgcctcgtgttaatgatctttttgaaacaagaattcctaagaatttaactgaaatggctaaagtaagtggaattgtgcaatttaaatcaattcaaaaaggaaaaagacttattaatattttagatgaatatggggttgagcataagcattatattccagccggcaaacatcttttagttagagatggagatattgttaaggcaggagatatgctttgtgatggtagaattaatcctcatgatgtgcttgaaattttgggtgggattagtttacaagagtttttgttggcagaaattcaagatgtttatcgaaaacagggtgttagcattaatgacaaacatattggtgtgataattaagcaaatgatgaaaaaagttaagattgtagcagttggtgatactaattttgtttatgggcaaaaggtagataagcacactttttatgagcagaatagaaaagttattgaacaaggtggtgagccagcaatagcaagtcccattcttataggagtaaccaagacttctcttaatatagattcttttatttctgcagcttcttttcaggagacaacaaaagtattaacagatgcttctattgctgggaaaatagatgatcttagaggattgaaagaaaatgttgtaattgggcatttgattcctactggaactggcatgggactttataaaaaaatcaaagttagtgaaaatgtcaattctgaagtt

SEQ ID NO: 36 - DNA, 3465 bp, Borrelia afzelii
atgataaaaagagttcatctgggacaaggaagagctgatgagattttagacttacctaacctgatagaaatacaattaaattcttatgaaaaatttttacaacttgataaattaaaaaataaaaaacctttacttaatgaaggccttgagtctgtttttagaaatatatttcccatcaaaagtggaaatggtgacgttgctcttgagtacgaaagatactatatagaaaatgatactcttaattttacagaaaaagaatgtaaaagaaaaggtcaaagttatgaagctgttttaaaagtaagactaaatttgcaatttttgactactggggaaataaggcaaaaagacgtgtacatgggaactattcctttaatgacagaaaggggcacttttattattaatggggctgagagggttattgtttctcagattcatagatccccaggagttgttttttataaagaaaaagatttatattctgctagaataattccctatcgtggttcttggctagaatttgagattgattctaaaaaagattacctttatgtaaagatagatagaaaaaaaagaatactcataactctttttttaagagctttagggcttgatacgagagaaaaaataatagaaactttttataatattaaaaaaattaaagttgaagagggtacaaaaagagatcttccaggtcaatatttagctaagagtattaacataagagagaatatgtattatcgagcaggagataagattactctacaagatgttgaagattttttacaaaatggagtaaatgaaatagagcttgttgattttgatggctataatgatgtttctggaaagtactttgtaagttcgaatgttattttaaattgccttgagaaagaggatgctttttttgctttaaaggatggctctaaagagcttccaaaagaatcagtcatgcttgctgtttatggggctcttttccctggcgagccaatatcgattgataatgctgaaaacgatttaaaaaccatattcttttctgaaagaagatatgatcttggacgtgtagggcgctataaactttctaaaaaatttggatctgacgatttaagtacatcagttttaactatggatgatattgttaacaccatatctcatcttttgagaatatatgaagggcatgatattcttgatgatattgaccatttgggaaatagaagagtgcgttctgttggcgagcttcttaccaatatatataaaggagcaatgtcgagagttgaaaaaattgctaaagatagaatgtctaacaaagaagtttttaatctaaaacctcaagaattaataagcgttaaacccattgtatctgctgttaaagaattttttgcaaccagccagctttctcagttcatggatcaggtcaatcctttagccgaacttactcacaaaaggcgtcttaatgctcttggtccggggggactttcaagagatagagcaggatttgaagtaagagatgtacattatactcattatggtagaatgtgtcctattgaaactcctgaaggaccaaatattggacttattgtttctttagctacttattccagagttaatgattatgggtttttagaaaccccctataggaaagttgttaatggagaagtgactaatgaattagaatatttatctgctattgacgaagagaaaaagtgtattgctcaagccaatgctgtttttaattctgatggaaagtatcttgaagatttggtttctgttagaatttctggtgattataccacaacaaaccctaaaaatatagattatatggacgtttctcctagacaattaatctcagtatcttcggcattaattccttttcttgagcacaatgatgcaaatagagctcttatgggctctaatatgcaaagacaagcagtgcctctgcttttccccaaacccccaattgttggtactggcatggaaagtgttgttgcaaaggattcaggagtagtagttaaggctaaaagaagtggggaagttattcttgcaacaagtaataaaatagttgtcaaaccttttgaatcagagaatgctaaagatttagatgaatatcatattgttaagtatgaaaggacaaatcaagatacttgttttaatcaatctgttttagttaaagaggggcaaaaggttgaaaggggtgaaataatagctgacggtcctgctactagatatggggagcttgctcttggcaataatttattactgggagttattccttggaatggatttaattatgaggatgctatattgatttctgatagaattgtaaaggaagatctttatacatctattcatattaaagaattcagtatagaagtaagagaaactaagcttggtcctgagaaagttacaggagacatacctaatgttagcgaaaagatactaaataaattggatgaaaatgggattatacggataggaacttatgtaaagcctggggatattttggttggcaaggttactccaaagtcagaaggagacattactcctgaatttaggcttttaacttccatttttggggaaaaagcaaaagatgttaaaaataattcgttaaaagttcctcatggtactgaaggtacagttattgatgttcaaagaattactaaagaggatgttggcaatctttctcctggagttgaggagatacttaaagtttatgttgctaaaaaaaggaagcttaaagagggtgataaaatggctggacgacatggtaataagggtgttgttgcaaaaattcttcctgttgaagatatgccttatcttgcagacggaacccctcttgacatatgcttaaatcctttgggagttccgtctagaatgaatattggacaattaatggaatcgcaattaggtcttgctggtaaatatcttagtgaatcttataatgttcctgtttttgaatctgctacaaatgaacaaattcaggaaaaattaaaaaaagctgggtttaatccaacttctaaagaaattttatatgatggttatacaggagagcctttcgaaaatgaagtaatggttggagtgatttacatgcttaagctacatcaccttgttgatgataaaatgcatgcaagatcaacagggccatattctcttgtttctcaacaacctcttggaggaaaagctcaatttggtgggcaaagacttggagaaatggaggtttgggctcttgaagcttatggtgcggctcacacacttcaagaacttttaacagttaaatccgatgatatgtcgggcagagtcaagatatatgaaaatatagtaaaaggtgttcctactaatgtatcagggattcccgagtcttttaatgtgctaatgcaagagcttagggggcttggacttgatttgtcaatttatgatgataatgggaatcaagttcctttgacagaaaaagaggaagaattgattaataaaagc

SEQ ID NO: 37 - DNA, 1047 bp, Borrelia afzelii
atggaaaaggtatttaaaataaaaatgttaaaaaaaatttgcttttgcttgttatttttgcaagcacaaatggttctttcccaagatcaacaagacttagacttcaatgatcaatatttttactttaattttcaatctgcttattaccctccccacgagatgggaacaaatggaaaaagtttttcacaaagctttaaacatcccaacttccaaaatattgaaccaagtttaaaaattccagctaattattggggaggaataaaattaatatcatacttggggtactataaaaatttcaaagctttacacaatcccaattctatattttttaaaaacaatggtatagacgtcgatttaaatatcggactatctcctgtaagcatctcatttaaaagcatgctaagctttactcctattgcttttttaaatttatatgtatcaaatgaaattggtatgggttgggaagcttttggatttaaggggattggtgtacacattgaaaacggaaaatattcaaatactcctgaattttattcagaaataacaatagggggacgatttcaattcgacttaaacgctatttttcaaggagactggacacatattattacagttatcggcaatgattttacatacttaattaatcttcacgcaaacaaaaatcaactttggaaatataaagcagacgatggtaaaaatataaatggtatgctaataaaaccttatgcccttttagcttacaaaatgccaatacctcttaatactataggcctactttatgaaggaaaaacacaaattggtaaagaaagaaacataagctcatggaaaaacaaaggttggggaagtgacattttttatcacaatatttctattgttgctaattttgaaattgccaagcctttaacaattggccttaaattaaaattatccacaaatcccacatacacaagcaatacagctggactggctgatatttcaaaaagaatagcaactggcaattcttatttttattacgattctattggaatctctgtaactcataaatac

SEQ ID NO: 38 - DNA, 4479 bp, Borrelia afzelii
atgaaaaaagcaaactttttaagtaccaattttttaattttgcttttggtttgctttgtcaatggcaatttattttctaaggatatttttaagtttaaacttgtagatcaatattttcctttttactataagaataataaaggagaatatgtagggcttattttttctattttagataaatgggcaaaagataataatgttgatattatagttgaacccattggtaatttaaatgaaagtaaaattgaagatgaagcaatatatttagggttgacttataattcaaaattaaatgatttattttattttaaaagtgagcttgccaggagtatttcgattttattttctaaaagctctaatataaaatataaaaatacccattcaacatttttatcaaactttaatataggggttgttaaaagtacaatatatgaagatatcttaagactaagaggtgctaatgcaatttttttggctgataatgttcaagagttattattggctttaaaaaatgataaagttgattatatatatggtgattgtaagactttacattatattgcacagcggtttttaggtgaagatcttgctatctttagcggagattttttttatagtatcaaaaatagggtggctattagtagaaatgctcctgagataataaagaatttgaatttagatttgttttcatatttaatgaaaatgcctgatgaatatgttgtttcttttttagatagaacttctaagggaaattttattgatgttggtttatataacgattatccccctttgagttttattaattcaaagggggagttgtctggtattttagtggatttatggaatcttctctcaagacagcatatttttaaacctattttcaagggatttcctaaagaggatattaagaaaacattagatggaaagtcagttggaatttttggaggaattattagcaatgatagcgtatttgaaaatgttaattatgtagtaagtaagccaatatatcctcttaattttaaattttattctaaaggtttaaacaataatgttggtccaataaattctcagtttattgattttaattttaataatattcaattaaataagaatcaagatattgttaataattttatagatattgtaaataattcatatgggtttatagaaaattcaataacagcaaaatatttattaaaattaaatggatataacggtagattaaaatcttacgattcgatttttaataaaaataggtttttagtattagctattgataacagggtttataaggttattaaatatattcttaatgctatatttgatgatatttcaattgaatctttacttcaaatagataaaaattggttagataaagaagagattaatagctctcgaataaatagttataaaattatgaataaggttaaatttaatatagaagaaaaaatttggttattagaaaataataaattaaatcttgctgttaaaaattggtatccaatagattatgttgaagcaaataattataaaggaataaatcaatttttgcttgataagattagaatgttttcgggtttagaatttaacataattgaaacatctagtagtttagatctaaaaaaattaattaaatctggaaaaatcgatatgctcaatactaatacgatcgattcaaatttagataatgttttcaatataaaattgaattctagaattccactttatattttttcaaataaaaaaagggtgcttccatctagatctttagagaggtttgctatacttgattttttatatagtaaaaatttggcttctaatattaaatcaaagcttgttctggtaaatagctttaaagaagccttacttcttctttacaagggaaatatagatggaattattagtgatgagtatacagctgcagctgtttttgaagaattaaatgttgtcgatgttgaaaaacttcctatttttagagatttggcttttgatttgagtcttgctatttatgatcaggattatatcttgaaagaaattattcaaaaagttgttatgcgttcaaatgttgatggtcagagatatttgaatgattggaaatttgatgtttattataagtccaaaggcattaggtttaaaaattttaaatttttagtgttaacagttattatattttattttacttttttaggatttgtaataatttttatgttcaaattatcatttgagcagaaaagaagatattcttttgtaatgaatgaaaaaaagatcgcagaagctgctaatgctgctaaaaccatttttatagcgaatgttagtcatgatattcgtacccccattaatggaataattgcggctactgagcttttggatacaactattcttacggatgtccaaaaagactatgttaggatgataaattattcatctgattctttactttctttaattgatgatatattgtatttgtcccaaataaatgtcaatgaattacatgttgagagtcaacagattgatttagagcgtgaaatggaaatggttttaaaaacttttcaatctcaatgtgcaaagaaaaatattgatttattttcttattctaaatctgtttttaataattatataaaaggtgacattgtaaaaattaaacaagttttaattaatttaataggaaatgcttttaagtttacagatgatggtgttattgttttaaactatgaagaagtatacagaacaagagttaatggtaatagattggttacagttgaattcaaggtaatagatacaggaaaaggcattaaaagagaaaatctttctaagatatttgaaatattcaagcaagaggatgattcttcttcaagggttcatgagggtgtgggattaggattgtcaatatctagagaacttataagactaatgggtggtcttggcattgctgttgatagtaaagtgggagagggtacgactttttcatttatgttgccttttttcttgggcagtgagcttaaaagtaaaaatttatcaatcaatagattccaatcaataaatagtaatagtaaagtattaaatgtactcttgagtaaaaaatctattaaaatttttgagcactgttcgactttgttaggccactcttctaatgtgcactatgtagcgtcttttgaggatgcttataaattttttaagaaatattctttttataattttgtttgtgtaaatgtaaataacgataatattgaagagagtattcgatttgctaataatattgaaagattaagttctgatgtacaaattatttttttattttattgcttagataataaagctctaaaaaatttaaaatatgtgtatgttaaaaagcctttaacagggcttggtatatcttctattctttctaaaaaagagtttgaaacagaggtagattttgaaaatttggctccaatagatagtgcttttaaggtaaaagaacccattagtgtgttaatagctgaagataatcaagtgaatcaaaaagtgctgaaagacattcttattgtaataggtattaatgaaaattttattgatattgtagatgatggagtaaaggctttaaaagctttaaaagaaaaaaaatatgctatctcttttattgatataagaatgccaagatatgatggattttcagtggctaaagaaattagaaaatttgaaaaggcaaagaatttaaagccatgtgttttagttgctgtaacagcacatgctttgcaagagtataaagatgattgttttaaaagtggtatgaatgattatatctcaaaaccaatacacataagttcaattaaaggcatattaaaaaaatatttacagtttgaagttgatgatattgggaagaatgaagatttaagccaacttgttaagttccccaatttagatgttaatagagctttaaaagaattaaatctttcatatacatcatattctgaattatgtagaggacttgttgatttcatctctatcaatattattgatttagaaaaagcttttgatgaggaaaatttgtctttaattagggacatatctcattcaatatctggagctctttctaatatgcgtagtgcattgtataaagattttaaaaaaattgaaacaagtaaagattcaatttatgagttgaaaaaaatgtattcttttataaaagatgatttattgcgactaataagcaacataaaggagaatgttttgtttgagtctgagattgttagtgagaataagctttactttaaaaacaatgatcaatttttaaaccttctcaataaacttttaattggcattaagactagaaagccaagagaatacaagggaattcttaagagcattgacaaatatgttttagacgataatattcaagtattatttagtgatcttcgcaagaatttaagattatatagatttgacgagagctccaagattcttaaagagattattgaaaagtttagcaataagagatat

SEQ ID NO: 39 - DNA, 780 bp, Borrelia afzelii
atggacggagtttttaaaatgatagatattcaacttttagatattgataatgatcagccaaggaaatctgttagtcttgttgaattagaagagttgagtatttctataaaggaaaatggaattttgcaacccataattgtttgtaaagtaaatgagaggtataaaataatagtaggagaaagaagatttagggctgccaaacttattcagatgacaaatattcctgttattgaagttaatataaaagaatcttgtagagattttatgcctttggttgaaaatatacaaagagaaaattttacgcctgttgaggaagcttatgcctataaaaatgtaatgaataaatattctttaactcaaaaggatttgtctgaaaaaattggcaaaagtagaacctatatttcaaatatagttaggattttagaccttgaacaagaaatattaaatgcagtgcatagaaaagaaatttcttttgggcatgctaaagttattttatccttaaaagacaaacaagataggtataatctttatttaattatactgaaaaaaaaattttctgtaagagacgcagaaaaatatgttaaaaatttttataaatctataacaaaaaaaaaagaagtcgaacaagatccttttttaagtaacataaaagaatttttatttgataaaattcaaacaaaaatagatattaaagggaatcaagataaagggaaaatagaaatagagtattttacagcaggcgatttaagaagaattgtttccttttttggccatatcaac

SEQ ID NO: 40 - DNA, 1917 bp, Borrelia afzelii
atgaatggaaggtttatgaattatgttgctagtaacattcaggttttaaaaggacttgaggctgttaggaaaaggcctggcatgtatataggctctgtttctgttaatgggttgcatcatttggtttatgaggtgattgacaatagtattgatgaggctttagctgggttttgcgatagaatagatgttattattaatttagataatactataactgtaattgataatgggagagggattcctacggatattcatgaagaagagggaattagtgctcttgaacttgttttaacaaagctacattctggtggtaagtttaataaaggcacttataaagtttctggaggattacatggtgttggaatttcggttgtaaatgctttgtcttcgtttttagaagtttatattaatagggatggaaaaatttttaggcaaaccttttcaaaaggtattccaacttctaaagtagaagttgtgggagaatcttctattacgggaactaaggttacttttttagcagattctgaaatttttgaaactttagattataattttgatgttcttgaaaaaaggcttaaagagcttgcttttttaaacgataaaatatgcatttcaattgaagataaaagatttggtaaagaaaaatcttcaaaattttattttgaaggtggtataaaatcttttgtagattatttaactaatgacagtaaagcttatcaatcagaatcttattatattgatggcttaataaatgatgttattgttaatgtaggacttaaatggactgagagttattctgacaatattctttcttttgttaataatattaatacaagagaaggggggacccatgttatgggttttagaagtggccttactaaggctatgaacgaagcttttaaaaattcaaaaataagtaaaaaagatgttccaaatcttacaggggatgattttaaagaagggcttacagctgttatttctgttaaagttccagaacctcaatttgaaggtcaaacaaagagtaagcttggtaattctgagataaaaaaaatagttgagattattgtatacgagcatttattgaaaattattaatttaaatcctttagagatagaccttattcttggaaaagcaataaaagctgcgcgtgctcgtgaggctgcaagaaaagcaagagaatcagaaagaaaaaaaaatgcatttgaaagcttagcattgcccgggaaattggctgattgtacttctaaaaatcccttggaaagagagatttatattgtagaaggtgattctgctggaggaagcgctaaaatgggcagaaatagattttttcaagctattttgccattatggggcaaaatgcttaatgttgagaaaacaagagaagataaggtaattaccaatgataagcttattcctataattgcatctcttggtgcaggagttggcaaaacttttgatattacaaaacttcgttatcacaagatcattattatggcagatgctgatgttgatgggtctcatattagaactttgcttttagcttttttctttagatatatgagagaattaattgaaaatggctatatatatatagcaatgcctcctctttataaaataaagtatgacaatcgtatttattatttttatgacgagaaagaaaaagaaaaatttttaaattctattgagactaaaaatcgcaatagtatccttttgcaaagatataaaggacttggggagatgaatccaactcagctttgggaaacgactatggatcctgctagaagaaaaatgagattgatgaatatagatgacgctgttgaggctgaaaaaatttttgttactcttatgggggatttagttgagcctagaaaagaatttattgaacagaatgcacttaatgtaattaatcttgatgtg

SEQ ID NO: 41 - DNA, 1758 bp, Borrelia afzelii
atgtttaaagttattaaatgtaatgaattaaatgaaaaattgataaacaaaaaagttgaaataaatgcttgggtaaaaaaaattagacaccacggaaaatttacctttctagacataagagacagatatgaaaaagctcaggttctgataactgaagaacaccttctaaagatagtagaaaaaataaaacttgaatattgcattaaaattcaaggattattgattaaaaggccttccaacatgataaatgcaaatatgacaacagggtattttgaaatattggcaaaaaatattgaaattatctcaaagtgtaatgaattgccatttatgatagaagatgacaataatgcaagtgaaaactcaaaacttaaatatagatacttagatttaagaagagattcattgaagaataaaatcattttaagatgccaagctactcatctaattagaaattttttagtaaaaagaaaatttttagaactagaaactccaacttttgtaaaatcaacaccagaaggcgcaagagactttgtaatcccatcaagaattcataaaggatctttttatgctttacctcaatctccacaactttataaacaacttataatgatagcgggatttgataaatactttcaaatagcccgttgctatagagacgaagattcaagaggagatagacagccggaattcactcagctcgatctcgaaatgagttttgtcaaaaaagaaaatatttttaaattaatagaaaatatgcttttttcaatatttaaaaattgccttaatattaaattacctaaaaaattcaaaaaaataacatacaaaatggcaatgaacaaatatggaagcgataaaccagatactagatttgaacttacattacaagatataagtcgcaatctaaaaaattcagaattcaatgtatttaaagatattctaaacaataaaggttcaattaaaactttgatagtaaaagataaagctgatacgttttcaagagcaaaaataaataatttagaagaaattgcaaagctttacaaaacacaaggactttatttcacaaaaattgaaaacaataaattttctggaggaattgcaaaatttttaaaaacagaagaacagcaattaataaaagcctattctctagaaaataatgacataattttctttatagctaataacaaatgggaaattgcttgcaaagcaatgggtcaaattagaataaaaattgcaaacgatcttggactaatagatgaaaataaatttgaatttctatgggtctacgactttccactatttgaatatgatgaaaatacaaaaacttatataccagctcaccacatgttctcgattcccaaaaagcgatatatttctaatttagaaaaaaatccaaacaaagctataggagaaatttacgatcttgttttaaatggcgtagaacttggttcaggttcaattagaatacataacaaagaacttcaacaaagaatttttaacataataggatttcaaaaagaaaaatcagaagatagatttggattttttctaaaagcattagaatatggagctcccaatcatggcggcattgcaattggtattgatagactaataatgctaatgacaaaatcaacttcaataaaagatgtaatactatttcccaaaaattcttttgcagcaagtcctcttgacaactccccttctaaaatctcaaatgaacaactcaaagaactgggaatcaatattgctgcagatgatact

SEQ ID NO: 42 - DNA, 687 bp, Borrelia afzelii
gtgaaaacaatagatcatgaactttattatgaatttaggatagcggatgatgttaaaatgatttatactaaaaaaccttttcatctaaatttaaaagaacttagtaatgataatttaaactttgttcctaagtcaaagaaaataaaatatttaaaacaattacacacagatattatttatgaagttaaagatgattttataaattttcaagaaggagatggtcttatatctagttctttagatgtagctcttgttacttactttgcagattgtcttccaatttacttttatgactcagtaaaaaaaattataggacttattcacagtggatataaaggaagctttagcttgattattttaaaaatgttgtttatgtttgaaaaaatgggatcatcttttaaagatttaaaaattgtttttggaccttataacagatcttgttgttatgaagtttctgaaattttcttgaaagaagtaagtaataaatttagcaaaagtttattaaatacggctttttccataagagataataaaatatactttgataatgctagttttaattttaatttactttctagttttaatttaaatatttatagttcaaaactttgtacgtattgctctaagaatctttattcttatagaagattaagagaggggcaaagttatgctttaatttggagaatt

SEQ ID NO: 43 - DNA, 1281 bp, Borrelia afzelii
atgcatagttatattgtagaaggcggttttaagataggtggtcaaattacagctagtggtaataagaattctgccttgccttgtattttggctgctttgcttaccgatgaagatgttattttagaaaatattcccaatattaatgatgtgaaagttgttttagatattttaagtgatataggagcagatattgtaagagagggtaatactttaaaaataaaagttttagatattgtaaaaaccgaaatagattcctcttttacagatttaattagggcttccatccttttattaggaccttttgtttctagatttggaaaaatagatatggcgcttccaggaggagatgtgattggaaagaggcggcttgatactcatttttacggtctttgtaagctgggggctaagttaagtataaaagatgaaaggattgttttaaaggccaacaagcttgttggagctgaaatgtttttagatgaagcttctgttacagccacagaaaatatcattatggctgcggttcttgctgaagggaatactgttattatgaacgctgcttgtgagccacatgttcaagatttatgtaatatgctaaattcaatgggtgctaatattttggggattggttcaaatgttttagaaataaagggtgtaaaaaaattaagtggaaccatatttagaataggagccgattttatgcaagttggttctttaattagccttgctgcattaacaggaggcgagctggaaattaaaaaagcagatccccagcatttcagattaattaggcatatatattcaaaacttggtattaattttgaatatgatagggaaaatgtatatgtaagagataaacaagaattaaaagtcaaattagattttggtggacaaattccaaaaattgatgatggtccgtggccagcctttccaacagaccttatgagtattattatagttactgcaactcaagtagaaggcacggttcttgtttttgagaagatgtttgaatctaggatgttttttgtagataagttaataaaaatgggggctagaattgtactttgtgatccacaccgtgtagtagttacaggtaaagctccacttaaaggtagcgttttatcttctccggatgtaagggcaggaatggctcttcttattgctgcttttgttgctgaaggtcgcagtgagatccaaaatgtttatcaaattgaaaggggatacgaagatgtagctagcaaattaattaatttgggtgcaaaaatcaagagagttaaaagtcaa

SEQ ID NO: 44 - DNA, 627 bp, Borrelia afzelii
atggaaagaaaagttttttctaaagatgggaaagagattaggactataaatttggatgatagagtttttaatatagaaattagtcatgggtctatttataatgctataaaaaatgagttatctaatcttagggttggtacatcttcaactaaaaccagatcagaggttaggggtagttctaaaaagccttggaagcaaaaaggaaccggcagggctagagtgggcacaaagcgaaatccagtgtggattggtggaggtatagcattagggccaaaacccagagattatagttatagattgcctaaaaaggtaaaaaggcttgcatttaagtctgtattaagtttacgcgcttctgatgaaaataattttaaggttattgagaattttaatattgaatcaggaaaaacaaaagatcttgctttaataataaaaaattttgcaagttttaatggtaaagtggttattcttttgggcaatgatgatcagatgatcaaaagggctggtaaaaatataagagatttaaagattttgtcttttgataaacttagagttgttgatttgttttacgctaagaatttaatagccctagaatctgctgttaacaagcttaatgagttttacgtcaaa

SEQ ID NO: 45 - DNA, 6486 bp, Borrelia afzelii
atgatagattttgcgactattttagttaacctttttttggtttcaatagttttgtttgtttataggcaatatgataaacgttctagagctttagataaaattaaaaagttcattgaccttacaaaggttaatcttgaagattttattgaagataagacaaaagagattaatgatcttgctgttgatatggaagcttatcaaagatctagcatagaaataataaaaaagattgaggaagttcagcaaaagattaaaaacaaaagcaatgattttgcagaggttgaaaaaaagatagcttatcatgattctatgcttaaggatcttgatgagatgacctttaaagttcaagagaatatagaaagattgcaagttgatgggaaaatagtagataaactttcaaaaactttaaaaggatttaatactcaaattgattcggttgaatcaaatttaaattcggtgttagaaaaatttgacaagaccaataaggaaaatctcgagtctattaaaattgctagttgggaaaagtttgatactaatattaaagaccttgtttttaaaatggacaatttgaataaagagattgatctttatgaaaaagatttagcaaatattgaagagagaaaaaaggatattttagttaagggtaatgagaaattagatttagaatttaacgattttcttgaaaaagttgaatttaatattgttaaatataataaagagatagaaaattcttttggtttttatgaagacaaatataagttaatagaaaattctatagagcttattatggagagcgtaaagaataaaattaatgagaaagaagattttattttaaatagactaaatgaagaattgcaaaataaatttaaggatatctttacatacgttgatgatcgttctaaggaaattcaagataaacttgaggataagttgattttagtagatgatgaaatttcttctatgagctcttcttttaaggacaatgtttattcaagaattaattcacttgaagaatcaatacgaatagagatgggaaaatatgaggagcaggttgatgatgtttttgataaatttagatctcaagttgaattaaatcttaaaaatatttatgaagattatgaagataaaataaaccaagttgataagaacattaaagaaagggtagaacttagtttgttagatttgaattctaaaatggaaagcgttcaagtaggtgctatcgatcttatgaagaggcttgaagatgattctaataaaatatatcttgaatttaaaaataagtttgaagaagatattaaagtatttagtggaagttttaaggatgatattaatcaacttaaaatgcaattagaatctcaacttttagatgttgattcaaatattcaagacaagcttattaagcttaatgataatttgatttctaattttgaagaaattggtggcaaatttaataataattattcaaatttaagtgatagtataaatgctaagtacacagctctttttgaatctttggattctagcagctctaaatttgaagatcaaatggaatctaaatataaagtctttacagataaattaacggcagaaatggatgatttttctttaatttatggtaaaaaatttgacacattctctcaagaagcgattaataattatcaagaatttcaagatttaaacaaaaaattagaaaatgaaattggatctttgtgtaatatgttagaagaaaaccaagagattttaaagcgagattttaatactagtttaattaacattaaagatgaaattggtaaaaatataatagagtttaaggatcgttattacgatgaggtaaatatttttgttagtcagctagaagaaagtaagctccaatattcaaagtggcaaagtgaaatggattctaatttaaaaaatattgaatctcaaataaataaaacaaatgaagaatttttaagtttaattcagattcaaaaagacaaaggaatagagcttagtgagagtgtttttaatgatctttctgatcatattcaaaaaaaagctattgatatgcatggtagttggaaagatgagcttattgctttaaataaatctttgcttgatattaagatctctagtgaagagctactttcatctgctactttaaaaatagaaaatctagaaaaagatattaacgatagaatggaatatgttttgttaaaaacaggtgatattgagagtttagttatagaaaaatataaagaattaaaggatatgtcatattcacaaagtgatgaagctatattagaaattaaagaatttattaatagacaaacagaaataattaaagataaaagtgtatttatgcttgaggatttaaacaaaaaatttgatgataagaataattttgttataagtaagattgaagaatgtgattataaattaaaagatttcaagattgaatcagaagatgttttaaataattttaaatctgatcttaatgaatttattgagtcaaaactacaaattgtctctgatataaaatcagacaatcaaaagcaaattgatgattttttagatagaatttccaaagatattttaaataggaaagattcaattaacaatgaagtagacattaagcttagtgattggcaaagcaaattaaacgaaataactgttaaaattgaaaatttattgtcttcaggcaaggtagatttggatttaatagattctgaagtaactacaaaaatcaaagagcttaaattttccatagaaagtcttgagagttattatcttgagaaaatagatgaatttagaaatcagggtgctatatattctgatgagcttttacaggatataatgaaccattttaataaagagactagagaacttgaggaaaatttgtcaaaaaagtttgctgtagttttaaataattcagaggaatttgttaaagaggttgatagtttattgcaggataaaagaactgatattgcttcttttcaggctaatatagatattactcttgattctcttagtgtaaagtttaatgatataaacaaagaaattaatgaaaaatataatgaagtgatatctaattacagagggtattcagaaaatatttctagcaaacttgaaaatgaaataatgcatgagattgaaaatctaaatagaagattaacagatagaatggatagtcttagcaaaggtatggatgaaaatcttcaaaaacttaaggaatcttttgatgtgtcaaaatatcaggttgaaaaatttgaattgaaagttaaagatctaacagatgatggagagacaaaaattagtgagtttgttaaagagatcgaacagtattataaatctagattagaagaagcaattgattataggagaactattgatagtgatattatgcaagcaaaagagagatttggagagataacaaatgatcttaaaaataatattgagagtaaatctgagtttttaaatgatctttataaggaaagatttaaacttattgagagtaattttgaagagagatattctacatttttaattgaaagtgagggagctatttcaaaaattagagatgagatctataaaacacttacaattaatgatgaaaatttgcagattaagattgctgaaatggatcataattttgagataatagaacaaagatcaaaagatattttagagtttgaaaaagaattgcgagataaaattcaggattgttacggtgttataaattctcaatttggagagattaaggtaagtgttgaagaggatataaaaaatcattttgaagtttgtataaaaaaggcaaacactttgattgatgatgacattataaagtatgaaaatgaaattcataagagaattgattctttaaaatcaattgaaaatacttttgatagcatagagaaaaatttgaatgacaaagtgaatgggtgtattgataaaatagccaatgattttaatcttaagtatattgaacttgaagaaaggtgcaatgaagggcaattgaatttagaaagtaaaattgacaacaaaattaaagccattgataatttagcttcaagtcaatatgatgggcttgagaaaaagtatgctgatatgtatgatgaatttttagagagattaaattcttatattacaactttaagtgaagagtttaagcattcaaataaagagatgatttttgaacttgaatctcaattaaaaaatcttaaaaatcttgagtctgatttaaataatgttgaaaaggatgttattagattaaaagaagagtcttatcacaatgtttcatcacatcttaaactattagaagaagatttttttaaagatttgaaaattagaggcgaagagcttaaatattctttggaaaactttgttgcttcatataatgataaaattcaaaatttagaatatgatttgtctaaaaatttggaaaacaagacagaacttattcaaagctttcacttagatattgaacaaaaaatgaaaaatgataaagaaaatttttatttggattttactaaggaattttcttccaaaaaaaaagatatggagagtgagatagctttaatggaaaccaatattactgggagagtagatgaatttattgattttgtaaataacaggcaaaatattattgattcttggtttttaaatattaaagatgatgtaaaaaattggcaagaaaaatcttatagcacaatagagaagaaaataaatcttgctgaacttggaattaaatcatttgagaatgatattcttaatgttaaaattggtttagaatcttttaaagatggttttgaagttaaggctgaagagatttttagcaatttgcaaagcgaggctaaaaaaattgaacaatcagttcatcttgattttaaaaatattggtgaatcattaaatcttaaagttttagatcttgaaagatttgttgattttaaagtagaaaagatagacgaaaaggttaataagaaaactgaagatatcttgactcaggcagaagtgaaatttttaactcagcaaaagaatcttgaagataggatttttgagcttaatcaaaaattggagcaagaatttacaactttatcttctaatcttgataaagtaaggcgggaaatggttgatgtaatttctagtgataaagaaagctttgaaggtcaaattgaattaatgcataaaaatatttcagaattttctgaaaaaattagtttatacagaagtaatattgagacatcaattgagaatgaatatagttctttttctaaatctataaaatcagagttcggtttacttgaggacgagcttaaaaaaagtttaaaacattcaacgttggagattgaatccgtaaagaatgacttacaagaacaaattgataagtttgaggttgaattcaaaaaaaatcataaagaattattaaaagaagttgatactaatgttttagaacttgaatctaaaatattaaattgtgatattacatttaataaatttattagtgacattaaagacaatctggttgaatataaatccgatttgagaaaagaatttgaagatagttatgataaattaaattttcaaattgaaaattttaaaaaactagatgctgagcttgaaaaaaataattcaatatttttagaggcctattctcttaaggataagttagagaaattatgggaaactttaaaaaatgagatagatcttgctcaggaatataaaaataattttgaaaacgttaacaaagaattctataatattcaaaaagaaacattaggtattattgaaacctttaatgatttaaagttagaacatgaatctattcaagctattaagaatgatttaaataaattttttgaattttattcttcatttgatagtagatataagagtttagttgaatcttatgatgaaatgcaaatttataaagctaaaataaaagagatatctgttgagcagagaaccattcttgataattatgaaagaattagcaacaaagagagtatattaaagagtactatagagtccgttgataaaaactttgatttaataaatgaagtggagaaaagatttaatactttaagtaaagagagcactaagtttcagaacaatcttaaagacatggaaaatgttgtttctaatctcttattaaacaaagggttgtctgaagaagtgctggttaatgctcagaatttaaaggaaatgctcttagatattgaaaataggttgaaaaacactttaactatgagagagaaggtggtgaaatctgagacaaggttagagaatttaaatattgcagcagaagagagaataaaaactcttggcattcttgtcaaaacagattctaaatatcaagataatgttggtcttaataatgaaactgttaggaattctgtaataaaattaatgaggcaaggatggagcgctgaagaaatttctagagctactaaattatctattggagaagttgagcttattttagaacttggtataagcaacaagggtgat

SEQ ID NO: 46 - DNA, 1905 bp, Borrelia afzelii
atgggcaaaataataggtattgacctaggcacaacaaattcatgcgtagctataatggagcatggaaaaccagtcgtaatacaaaattcagagggaggaagaactactccatctattgttgcctacacaaataaaggcgaaaggcttgtggggcaagtcgcaaaaaaccaaatggttacaaaccccgaaaacacaatttattctattaaaagatttatgggaagaagatttgaagaggttgcaagcgaaataaaaatggttccttataaaatagaaaagggactaaatggcgatgcacgagtaaacatttctaatataaaaaagcaaatgtcgccgcctgagatctcagcagcaactcttacaaaaatgaaagaaacagcagaagcttacttaggtgaaaaagttacagaagctgtcattacagttcctgcttactttaacgatgctcaaagacaagctacaaaagatgctggtaaaatagcaggccttgaagtgaaaagaattgttaacgaaccaactgctgctgctcttgcttatggaattgaaaaaaaacacgaagagattgttgctgtttacgatcttggtgggggaacatttgacatttcaatattggaacttggagatggtgtttttgaagtaaagtcaaccaatggagatacacatcttggaggtgacaattttgatgatgagataataaagcatttaatttcggaattcaaaaaagaaagcgctattgatttatcaaacgataaaatggctcttcaaagactaaaagaggcagctgaaaaagctaaaatagaactttcaggcgctcaagaagcttcaataaatcttccatttattacagcagatgcaaacggtccaaaacacttacaatatactctaacaagagcaaaattcgaacaaatggtagaccatttagttcaaaaaacaaaagaaccatgccttaaagctattaaagatgctggacttaaagcttctgacattaatgaagtaatacttgtaggcggatcaacaagaattcctgctattcaaaaaattgtaaaagatatattcggacaagatcctaacaaaggagtaaatccagatgaagctgtagcaattggagctgctattcagggtggtattttaaccggagaaactaaagatatggtactccttgacgttactccactctcactaggaatagaaacgctaggtggtgtaatgaccaaacttattgaaagaaacactacaattcctacaaaaaaaagtcaagtattctcaacagccgctgacaatcaaacctctgttgatattaaggttcttcaaggtgaacgtgaaatggcagcacaaaatagaatacttggtaattttatacttgatggaataccagcagcaccaagaggagtgcctcaaattgaagttagctttgacattgacgctaatggaatagttcacgtgtctgcaaaagatatgggaacaggcaaagaacaaaaaattagaattgaatcatcatcaggactttctgaatcagaaatagatcgcatggtaaaagatgcagaagctcatgcagaagaagataaaaaattaaaagaaaatattgaggcaaaaaatacagctaattctttaatttatcaaacagaaaaatcattaaaagaatattctgaaaaaatttcaatcgaagacaaagaaactattgaaaataaaataaaagaattaaaagaaagtcttgaaaaagaagacatttcacttataaaatctaaaacagaagaacttcaaaaagcttcttacaagatagctgagatgatgtataaagattcttcccagcaaaatgcaagcaaccaacaagaaaatggtactcaaaacaatacaagcgaagaaggcaaagaggctgattacgaagttgttgacgaggataaaaaa

SEQ ID NO: 47 - DNA, 561 bp, Borrelia afzelii
atggaaaaaaaagaaactaaaaacgaaactgaaaaaaccaacaagcaagataacaaaaatacaaaatctcaaaaaaaagaaaacttgaatttggtaaattctgataaaaaaattaccgaacttgaaaatgaaatctccaatcttaaagatttgtatttaagaaaacaagcagaatttgaaaacttcagaaaaagattagaaaaagaaaaagataattttgttaaatttgcaaatgaaaccataatgaaagatgttgttaattttcttgataacctagagagggctattaactcttcaaaaaaatctaaagattttgacaacctattaacaggaatcagtatgattgaaaatgaaatactatcaatctttgataaaaaatataatttaaaaaaatttggagaaaatggcgaaaattttgatccaagtcgtcatgaagcaataagcattgaagagaaagaagatcttaaaaatccagaaatagtagaagtataccaaaaaggatattgctacaacgacagaatattaagaacagcaaaagttaaagttgctcaaagtaaaaat

SEQ ID NO: 48 - DNA, 744 bp, Borrelia afzelii
atgaaagatttgaatgaaaataatgacaataataaaggattttttgtagcattaacctcaatcgcaacagtttgcatcataatatttcttgggacaatcattttctttccaaacaaaaatttaacctcagatattgcagagaagaatattgttttagaagaaaccaaagatcaaaacactttagaaaacgttgaccaaaatgaaaaatctttaaaggtatctgaaactccaaatgaaataatcatagatttaacacaagatttaaataaagaaaaaaaaactacacctcaaaaaatacctaatacttctcaaaaatcaaaaattattgaaaaatctcaacctacacctcaaaaaatacctaatacttctcaaaaatcaaaaattattgaaaaatctcaacctacacctcaaaaaatacctaatacctctcaaaaatcaaaaattattgaaaaatctcaacccgtagcccaaaaagatttaaacattgataacatatatgaccctaatacagaatattacatacaatttgtatcactttcagacccaattaatgcagataactatattcaaaaattactcaaatataatatagttgccaaaatatattctgcaacagtagataataaagatatttacagagtgagatctggaccttataaaacaaaatcagaagcaaaagcggactttaaaaaaatagcaggaataagcgaatttaaagaaacttatatattaccggttaacaaa

SEQ ID NO: 49 - DNA, 1503 bp, Borrelia afzelii
atgaataaaataaaaaatcgaatctttatgtattttataatacttttatgtatatcattatttggggcagctaataatacaataaactactctagcattgaaattcctctagaagacttaagtgaagaatttaaagatactgagaataaaaacgatcaaacaaatgccttaaaacacttaaacaaaaatatagcttcttataaagaccttaaaaagggcaaagatctaaaattgccggaaaatataagagacaaaaaactgtttaaaaaaagaatggacgaaaatgatctaaaatctgtaattgaaaattatgaaaataaaattaaaaatatagaaaagcttttaaaaaccaaaaatcaaaaagcatcggcaaatgaaaataaaaaaatagaattaattgaaaaaaaagctaaaaaatatgaaattttaaccaataaattaaaaaacgaaatagtagaaataaaaaagctccttaacaagaaatccagaccaaaagatgctgaaaattatgaaaaaataaatattgaaaacattgatgatgatgatgatgatggtgatgatgatgattttgaagaaaattatgaatataatgacgaaattgaagaaacaaatgaggacaactacccttctaatgaaggaataataaataacctaaaagaaaaactttatgagaacgaaaagtattacgctatcaatgaaaaaaaatttgatgaacttgaagacagaatcaatgataatgaaaatattattttagacttgcaaagagagttaagaaacttcaaaaaaaaagatgactcaaataaaaacttagaagaaattgaagaaaacttgtctttaataggaaaaataatcaatggcctgaaagaaaaaattagcgcaaatgaagcaataaacaaagaaaatcaaaaaaaaataagaactgataaacacaagctcaaagaattagaagataaaatcaaagaaaatgaggaaactattttaaaacttcaaaaagaattaaacaattttaaaaaaaaagaaatttctcaaaaatctttaaatgaagaagctttcattccaagcattccaaacaaaaatgacgacttggaagaaaatgttaaattagaaaagaaatatttaaagcctgcagaaaagaatgaaagccaagatctagaagaaaatgttaaaagcgccccaaaaacaactatgatcaaaacagcggattttcaaatttaccctgacatataccttaataactataattttaaagaaaaaggggaccaatttgcatttaaaaaagaaaacacatactatattgaaatagatccaactaataatttaaatggggctttaaaaaatcatgaaataatttcaaaatataaatttgaaaaatatttcattaaccctactctaaaaaataaagaagaattttttaggaatttaatagaagtcaaaaatatccacgaacttggaattatgtataaaagtttaaaacctgaatttaaacaaataaaaataattaaa

SEQ ID NO: 50 - DNA, 1950 bp, Borrelia afzelii
ttgattctaacttcctattttaaacaaattgctttatttattatttttagattatgttatatcataaaaaaagtaaagattaaattgaaaaggaaaatttacatgaaaaaacaatttgatacagaagtaaatgatttgctttatttaatcattcattctctttactcccataaggaaatatttttaagagaattgatatcaaatgcctctgacgccattgataagctcaagtttttaagcttaacaaatgaaaaattcaaaaacatcgctctagaaccaaaaatagaaataacatttgatgataaaagtatccttatcaaggataatggaatcggaatgaatgaacaggaattaacaaatcatcttggtgtaattgcaaaatcaggaaccaaagaatttattaacaatttaaaacaagatgaaaaaaaatctgcaaatctaattggccagtttggagtcggattttacagtgcattcatagtatcagaaaaagtagaagttacatcaaaaaaagcactagaaagcgatgcttatatttggtctagcgacggtaaaacaggatatgaaatagaaaaagcaaaaaaagaagatccgggcacagaaataaaactttatcttaataaagaaggccttgaatatgctaataaatggaaaattcaagaaattgtcaaaaaatattcaaatcatataaattatcccatttatataaaatacaacgaacctataatgaaggacgggaaacaagaaggaatagaagaaaaagaagaaaaattaaacgaaaccactgctctttggacaaaaaataaaagcgaaattaaaacagaagaatacaacgaattttacaaaaatacaacctttgattatgaaaatccattgatgtatattcatacaaaagctgaaggaaatttagaatatactaatttattttatatcccaagtaaagctccttatgatttatattacccaaacactaaacctggagtaaaactatttataaacagaatctttattacagactctgaaggtagtctgcttccaaactatctaaggttcataaaaggaattatagactgccaagatttaccgctcaatgtaagtagagaaattttacaacaaaataaaattttgtctaaaataaaatcatcttctgtaaaaaaaatactaagcgagcttgaaaagctaagcaaaaaaaatcctgaaaaattttcagagttttctaaagaatttggaagatgcattaaggaaggtgtttattctgactttgaaaacagagaaaaacttatctcattaataaggtttaaatcttcaagtgtagatggattcgtctcttttaaagagtacaaagaaagaatgaatgaaagccaaaaaagcatttattatataacaggcggcaaagaaaatatattaaaagaaaacccaatagtaaccgcttataaagaaaaaggatttgaaatcttaatcatggatgatgaacttgatgaggctattttaaatctaattccagaatacgaaggattaaaactaaaagcaataaacaaaaatgaaactagcaatgaattaaaagatgaaaatttcaaaaaaattgaagaagaatttaaagatacccttacaagggtaaaagaaatccttaaggaccaaataaaagaagttaatctctcagcaacattgataaaagaaccttcagcaataatagttgatagcaatgatccaacttaccaaatgcaaaaaatcatgctttcaatgggacaagaagtaaaagaaattaaaccaatacttgaattaaaccctaataataaaatagtccaaaatttaaaaaatctagagcctgaaaaattagaaaaaataagcattctcctttttgaggaagctctgctaacttcaggaatgcctagcaaaaatccaagaaaattcataaacataataaacgaatttctagaaaaagacttgttg

SEQ ID NO: 51 - DNA, 687 bp, Borrelia afzelii
atgcttgaaataataagtcttggaggaggagtaataaattcaaatcaaatcaacatagaattcattaaaaactttaaaaactttgtttttaaatggttactagaaaatgaaaaaagaaaaatcattttaatagttggtggaggaaaagttgcaagagaataccaagacgcctacaaaaaaataaaccctaattttaaagttagtgagcttgatgagattggaataatgtcaacaaagttgaacgcagaatttctgtgtaaggtaatgaatcctctttgtaaagacaaaattgtcactaatcctttaaaaaacttttcttttaaagggaaaatactaatcgcttcgggctggaaatcgggattttcaacagattacattgccgtaaaatttgcagaaaaatttaataaaaaagatattataaatataacaaatgtaaatcaagtttacgataaagatccaaaaaaattcaaaaacgcaacggcttttaaaaaattaaattgggaacaattacaaaacattgtgggtcaaaagtggaatccaggtttaaatttaccttttgatccaatagcaacaaaactctcttcaaagcttggacttaccctttacatagtaaatggaaataatattgaaaacttagaaaaagttttcaacaaaaataatgattttttgggcactgttatagtaaaa

SEQ ID NO: 52 - DNA, 3483 bp, Borrelia afzelii
ttgttaaaaatcaagttttattttgataaaataattttaggtatgagttttagggctaagtttattcatcttcatgttcattcagattattctcttttggatggagctgcaaaaatatcagatattatatcaaaagcaaaaaaatgcaatatgtcacatattgcattaacagatcatggtaatctttttggagctattaaattctataaagaagctaaaaaagcggggattaagccaataattggcattgaagcttatatggcaaaaacttctaagtttttaaaaaaacatgatgatcttggaaaaatgtcttaccatttaattttgcttgccaagaatgagctgggttataaaaacttattaaagttaacaagtatttcttatcttgaagggttttattatcgtccaaggatagataaagaggatcttgaaaaatattcagaaggtttaatttgtacttcagcttgcattgggggactcatcccaagacttattttggccaatagatttgaagatgctaagaacgaaattctttggtttaaaaaagtttttggcaatgatttttatcttgagcttcaaaggcatggcattaaagatcaagacattgtaaatgaacggttagttgaatattctaaggagcttggagttcctttaacagtagctaatgattctcattatgttaatagagaagatgcatctgctcaagatatcattgtttgtattgggactggtgctaaaaaaagcgatgagaatagactgaaaatggagacaaatgaattttatattaaatctcaagaggagatgtgtgaactttttaatgatttgcccgaagctttagaaaatactgtaaggattgcagaaaagtgtgatgattttaaaataacttttccaggccctattttacctgattatcaaattcccattgaatttaatactcttggtgaatatttagaatatctcactcttgaggggttaaaatttagatataaaactttgacaagcaaaataaaagatagagccttttatgaattgagcgtgataattaggatgggttttgaaggctattttttgattgtttgggattttattaaatttgctcatgatcatgatattcctgttggagctgggcgtggctctggtgcgggttcaattgtagcctatgctcttaggattaccgatattgatcctttaaagtataatttgctttttgagagatttttaaatcccgagcgcatttctatgccagattttgatattgatttttgttttgaaggcagagatgagattataaaatatgttaccaataaatatggagaagataaggtagctcaaataattacttttggaaccttaaaggctaaggctgtggttaaagacgtagctagagttttagacattccatttgctgaatcgaatgaacttactaagtttattcctgatggtcctaaagtttctttaaaagaggttttagacgacaattctttaaaagagtattttactagcaaacctgtttataaagaattaatgaatgctgcattagttcttgaaggaatgaatagacatgcttcaactcatgctgcaggaattgtaatttctaaaacccctttaaccgattatgtacctctttataaggattataagcaaggttctatttctactcaatatacaatggatttacttgaagaatgtgggcttgttaagatggattttcttggcttgaaaacattaactttaataaaaaatgcagaaaatcttattagaagtgtaaatccagattttaaaataaaaaatattccagataatgatgttaagacttttaagatgttaggagaagggagaagcgcatctgtttttcagtttgaatctgagggaatgcagcaaattctaaaagacgcaaagcccgataatattgaagatttgatagccttaaatgctctttataggccaggccctatgcaatttattcctcaatttattgctgctaaaaaaggtgttaagaggattaagtatccccatccagatttaaaggaagttttaaggccaacttatggagttattgtttatcaagaacaagtaatggaagttgcaaaaataattgggggtttttctcttggtaaggctgatattttaagacgtgctatgggtaaaaagaaagaagatgagatgaatgaaatgaaggttgactttttaagaggcgctattgagaaagggtatgacaaagaaattgctagtgaaatttttgaacttttaaagcctttttctgggtatggatttaataaatcacatgcggcagcgtattctttaatagcgtatcaaactgcttatcttaaggctaattaccctgagtattttatggctgctaacttgacaaatgaaattaataataacgataagctgtcttattacattgaagaatcaaaagctatgggtataaacgtgcttaagcctgatataaatcgatcatttagagaatttcgtgtaactgactctggaatttcttatgggcttaatgggattaaaaatcttggaggaattgttgttgatttaataattgatgagagagagaaaaacggcaaatatagttcttttgaggattttatcagacgtgtagatgataaagtaattaataagaaatttttagaatctgcaataaaatctggactttttgatagtttaaatcaaaatagaaaaactttatttgaaaatcttgatcgtttgattgaagttgtttcagaagataaaaataataaaaggcttggtcaaaatagtttgtttgatgttcttgaaagtcaagagtcaattcagcaaagttttaattatcaggttttgaaagaatattcttattctgagcttttaggatttgaaaaagagcttttaggattttatgtatcagggcatcctcttgatccttataagaaggcgattaataatttttccagtttaaatgttttaaaagatcttgctgctaaaaaagatagcattgttcaattttctggcattttaaattcagtaaaaattattcaaactaaaagaaataattcaagaatggcttttggtgttattgaagattttaaaggcgcaatagatattgtagtttttacagaaagctatgaaagatataagaattttttacttgaaggtaatgttattggggttataggtagacttacgtttaatagagacaaattttcaattgtagttgaaaaagttgtaaatattgagagactctcagaagataaagtaaataatattcatattaaatttttaagtaataaattaaatgatttgcaattacttaattctttaaaggaaagtataagtaattttgaggacaattctggattttcaaatgtttatttttatttaagggaaaatggtaaggatttaaaattaaaaatgaattcaattttaaattttgggccagatgaagacaagcttgataagttaagaaggtgtgtgatagttgaagatgtttgggttgat

SEQ ID NO: 53 - DNA, 792 bp, Borrelia afzelii
gtgaacaattttttaattaaacttttgctttttttgttagttttttcaaacagttatgttgctttttctaaaaacagcaatgttttaataataactgctatggactctgaggttgagcagataaataagcttatgtctaataaagaagaaatagtgcttaaggagtatggtcttaataaaaagattttaaagggcaagttgtctaatcgcaatgttattactattgtttgtggggttggaaaggttaatgcgggtgtgtggaccagctatattttgtcaaaatacaacataagtcatgtaattaattttggagttgctggtggtgttgttagtgataaatacaaagatattaaagtgggagatgtggtagtgtcttcagaggttgcatatcatgatgttgatttgactaaatttggacacaaagtaggacagcttatgggattgccgcaaaaatttagtgccaataagaatttggttgataaagctacaaaggctgttaaatctaaggctgtaagctctaattcatattcgggattaatactgtcaggagatcagtttattgatccagcttatattaacaaaattataggaaactttaaagatgtaatagctgttgagatggaaggtgcagcagtagggcatgtttctcatatgtttaatgtaccttttatagttattaggtccatatctgatattgtaaataaagaaggaaatgaacttgaatatagtaaatttcttaaattagctgcttttaattcagctaaagttgtacaagaaattttaaggattctt

SEQ ID NO: 54 - DNA, 1857 bp, Borrelia afzelii
atgaaaaatcatattttatataaattaattatatttttaaccacatctgcagcaatatttgcagcagacgcattaaaggaaaaagatatatttaaaataaacccgtggatacctacatttggatttgaaaacacaagtgaattcagatttgatatggatgaacttgtccctgggtttgaaaacaaaagtaaaattactattaaacttaaaccatttgaagctaatccagaattaggcaaagacgatccattttcagcttacattaaagtggaagatcttgcattaaaagcagaaggcaaaaaagacgctcaattcaaaatcgatgtaggagatataacagcccaaattaatatatacgatttttttattaaaataagtactatgacagattttgactttaataaagaatctttatttagctttgcgcctatgactggattcaaaagcacttactatggattcccaagtaatgatagagcagtaagagggacaattcttgcaagaggtacttctaaaaacataggaacaattcaactgggatacaaactcccacaaatcgaccttacatttgcaataggaggaacaggcacaggtaacagaaatcaagagaatgacaaagacactccatacaataaaacctatcaaggaatcctttatggaattcaagcaacatggaagccaataaaaaatatacttgatcaaaacgaagatactcaatctgtaattgcagaaacaccttttgaattaaactttggcttatcaggagcttatggaaatgaaacattcaataattcatcaataacatactctttaaaagataaatccctaattggtaacgatttattaagcccaactttatcaaattctgcaattttggcatcttttggagctcaatataagcttggattaacaaaaatcaataataaaaatacctatcttattttacaaatgggtactgattttggaatagatccttttgcaagcgatttttctgtatttggacacatctcaaaagcagcaaatttgaaaaaaggaatatctttagatcctagtaaaaaagccgaggatatatttgatccaaatggcaatgcccttaatttcaataaaaatacagaactaggcattgcattttcaacaggagcaagcatagggcttgcttggaataaaaacgccggtgaaaaagaatcttggaaagttaaaggatctgattcctacagtacaagactatttggagaacaaggcaaaaaatctggagttgcattaggaataagctatgggcaaaatctttacagatctaaagatacagaaaaaagattaaaaaccatatctgaaaatgcatttcaaagcttaaatgttgaaatttcaagctatgaagacaataaaaaggggcttatgaatggactgggttggataacatctatcggtctttatgatattttaagacaaaaatctgtagaaaactatcctacatcaaccttaagtgctaatgagaacaatcaagctggacaaagttcaacaggcacacaagccataacacctaatctaacatttgaagacgcaatgaaactaggcatagctttatatcttgattatgcaattccaatagaatccatttcaacagaagcatatgtagtaccatatattggagcataccttttaggaccttctaataaaatatcaagcgatgctacaaaaatttatttaaaaacaggacttagtcttgaaaaactaataagatttacaacaatttctcttggatgggattcaaataatattatagaacttgctaataaaaacgcaaataatgctgctattggcagtgctttcttgcaattcaaaatagcctacagcggaagc

SEQ ID NO: 55 - DNA, 1428 bp, Borrelia afzelii
atgagtattgtaattgattcttttagagaaatatcaaaaattccaagatgttcaaaaaatgtcaaaggaattattaattttattaaggagagagccaaaaaatttggttattcttttaaagaagatagtgttggtaatattgtggtgcagataaaatctaataataacattgatatgcctcctattattttacaatctcatgttgatatggtttgtgaaaaaaatgaatcaagtttacataattttgaaacagatccaattaaaattgttgaagaagatggatatcttaaaggagtagggactactcttggagctgataatgggattggggtagctatgatgttgggcattatgagtgaggctgatagtttcccccatcccgatttagaacttctttttaccgttgatgaagaaataggtttaataggtgctcttggtcttgattctaaattatgtaatggtaaaagccttattaatcttgatggagaggaagaaggatattttttagttggttgtgcgggatcaagacttgttgagattgttttttctcctcaatataatcttgcaacaaaaaaaacaaaagtggaaattttgctcaaagggcttaaaggtggtcattctggggcagatattcatttagatttggcaaattctttaaaattaatgttttttgctctttttgaaattaaagcaaatattgattttgagattgaaagtatttttggtggagagagcagtaatgcaattccaaatgaagccaaggctttaatctgtatcaatgatagtgattatgaattattaagtaaagagcttaaactttttgtatttaaagttaaaagtatatattctcttgaaaatgaatttgacattattgttaataaaaaagaattttcatcagttaaagttcttgatgaaaatagcaaaagcaggcttttgaatatgggaatgggatttttacatggagttcaaagagtagaaaattatgaaaataagcttatcaagacctctttaaatttttcaagtcttttcaaaatgcaagatgagtatatttttacttttttaataagatctttattggattcagacaaagagtatgtgtttaatcatttgcaatcaataagtgatttatcaggagctagttggcgtataatttatgattatccttcttggaaatccgataagaatagtagtcttttaaaacatcttcaaggcgtttataaagagatgtatcttgaagatgctaatgtttctttaatacatgcagggcttgaaacaggtataatatcttctaagttaggaggcatagagtctgttactcttggaccttggattgagtcgccccatactactagagaaagggtaaatatttcttcggctattagagtttatgattttttgaaaaaaagtttagaaagatttcaaaaattt

SEQ ID NO: 56 - DNA, 1290 bp, Borrelia afzelii
atggcaagagtaaaaggtcaaaaagtaaaagaatgttctttttgtggacttagcgttgctgagcttgggggcaatgttgttatatctaatggggtagcgatttgtccggaatgttccaagatatgtcacaatctttttaaagaaaagttgtgcaagtcgctggattctagatccaatggtttgccaacccccaaacaacttaaagatcatttagatatgcatgttgttgggcaagaagatgcaaaaaaagttttatctgtggctgtttataaccattataagagaatattgaaaaataataaatatgatgatggtattgagattgaaaaatccaatatacttttggttgggcctacaggtagtggtaaaactttgcttgcaaaaacgttggctgcagagatgaatgtgccatttgcaatagcagatgccacaactttgacagaagctggatatgttggtgaggatgtagaaaatattttacttaaattgatacatgctgctcatggggatgttagtctagctgagaaagggattatttatatagatgaaatagataaaattgctaaaaaaaatgaaaacgtttcaataacaagagatgtgtctggagaaggggttcaacaagctttgttaaagataatcgagggtactattgctaatgttcccccaagaggtggtaggaaacatccttatgaggatactattgaaattaatactcaaaatatactctttatatgtggtggtgcttttgttgggcttgaaaatattgttaagaatcgaataaataaaagttctattgggttttcagcaattgaaaaaaagaatataagagatgacgcttcattaaagtatttggaaatggaagatttgattaaatttggtttaataccagagtttgttggtagacttcctgtacattcgtatcttgaaaagctaagtaaagaagatttgattaaaatattagttgatcctcaaaattctattgttaagcagtattatcatatgtttaaaatggacaatgttgaattagtctttgaaaaagatgctttagaatcaattgtagatgaggctattttaaaaaatactggagcaagaggccttagatctattttagagggtcttcttaaagatgttatgtttgaggttccttcgattagtaagactaagaaggttattgttacaaaagaatctgttttgaatgcagatattaacccattaattttggtggggaatgcaattaaaaaaccttgggcaaaagagttatatgaaatcaatcttaaatatgataaaaaa

SEQ ID NO: 57 - DNA, 2439 bp, Borrelia afzelii
atgcaattaaaaaaccttgggcaaaagagttatatgaaatcaatcttaaatatgataaaaaatagaaaagaagatcttccaattgttattttaaaagaaaatgttcttttcccaaatgtgacattgtgggtaacctttgataatgaatatgtaattaactccatagctcaatccatgctagaggaaagattaattctgtttgcttatccaaatgaatctaattatgacgaatctggtaaagaaggggttaaaaacctatgttctgtgggcacttattctaaacttatccaggttataaaggttagtaaagacgtagtaaaagttttggttgaatgtcaaagtagggttctaataggcagtgtttcaaaaaaaaatgattatttaagagccaaagttacttttgtgtctgatgctgagggattaaatagggaactttttacttacgctaaatttttaaaagaaacttatgaagtttatagaaattccctatctttaaaatcttatgatagcgataatgagccaattaattattttgagaatccaagcaagcttgtcgatattatggcctctaattcaaacttagaaaatagtgtaaaattagatcttttacaagagttaaatgttaaaactagaatagaaaaattaattgttaatttaaacattgagattgaccttttagaccttaaaaaagatattaattctaaagttagagctaagctggataaggggcaaagggattattttctttctgagcaagttaaagagatacaaaaaagattaggtaaagatgaaaacgagtatattgatagattaaattctaaagatattccagaagatgttaaatctaaggttgaaaaagaaatttctagattatctaaaatgcagatgaattcccctgatgctaatattattagaagttatatagaattaatattagatcttccgtggaatgaaaatactgtcatgaaaaatcatttaagcgagattgaatttatcttaagaaattctcattatggcatggatgaagcaaaagaaaagataataaattttttagctgtttatcaaattaattctaaggttaaagctcccattttatgccttgtagggcctcctggtattggcaaaacatctcttgtagaatctattgcaagatcattgtctagagaatttgttaaaatatctcttggtggcttaagagatgaggcagagattagagggcacagaagaacttatgttggctctcttccaggtgtttttattagtgcaatgaaaagatccggcaagtctaatcctgttattcttcttgatgaaatagataaaattaataatagttataaaggaaatcccgaatctgcccttttagaagttttagaccccgagcagaattataaatttatagatcattatttagaaattccttatgatctttctaatgttttatttgttacaacagccaattctcttaatggtatgtcaaagccacttcttgatagaatggaaataattaaagttgagggttattcttatattgaaaagttagagattgcaaagatttttttgattccaagcataattaaagagagttttttagacaaagtttatataagaatagaagacgatgttatttttaatttaattagaaattatactatggaatctggcgtaaggggactaaagagagtattgactaatttgattaggaaacttgtaagggagttgctttataagtattctaaagatcaaattatcaaaggcaatttttattcaccaagttctttaatacatggaaataattcgctttttactcatgatcctgatattccaggtatttataaaataatcaatattaataattattataattatgttgatactgagtataacttggatttaattaagattgactcttctggatttgtttatggacttgcttggacaaattatggtggcacagttcttcctgttgaggcaactaagtttgagaaaaaaggagacattattttaacaggtagtcttggaactattatgaaagagagtgcacagcttgcatattctatagttaagacctattcttctaggcttaattttgacgtaaaagaaagtcccgaaattcatttacactttccagaaggagcaacaccaaaagatggaccttctgcaggtattaccattgcaacagcaattgcttcaatactgtctgataagaaagttcctttggatcttgcaatgactggtgaggtgactttaaaaggttttgttcttcctgtgggcggcattaaagaaaaagttttagcagcctatagaaacggcataaataaagttattttgcccaaagataataaaaaagattattttaagcttccagaagaagttaaagataatatagatgttaagtttgtttccagtttggaagaagtttttgattatttgaatattatt

SEQ ID NO: 58 - DNA, 2094 bp, Borrelia afzelii
atgactacattgttcaaaatactggcattaaggaaaagtaaaacgttttatgttttgcaaattataaaacttattatattattttattttttaataataagtcctgctaatcttaatgctgattttgagtataaggttggcaaaggagatactcttttttcaattgcaattaagtataaagctaaagtaaacgatcttaaaaggattaataaacttaatgctgacaatattagagtagggcaaatattaattattccaagtgattctagtttagatccaaatattactcataaggtcaatcattctcttaattcgctagaatctattaagaagggggtaattctttacactgtaaaagagggtgacactattgagagtgtttcaaagcttgttgggctaagtcaagaagagataatagcttggaataatttgcgatctaaagatcttaaagttggaatggagcttgtgttaactgagcctgattttttaaagccctatgtagttaagaaaggcgattcactttcaaaactttctcaagattttgatattagttctaaggatattttaaaatttaattttcttaatgatgataaattaaagattggtcaacagctttttttaaagagagctactaagaatattgattttcattatgttaaaaaaggagaaacccttggtagaatagcttatatttatggtgttactgctaaggatcttgtaactcttaatggtaatcgtgctgttaatcttaaagcaggttcattgctaaatgttttaaagattgtaaatgatgatttagaaaagtctgttgaggaagatttaaaaattgaaaaaaaaacagataatcagtttatctatcattcagttgctgtaggggagactttgtatagtattgctagacattacggcgttttaattgaggatcttaaaaattggaataatttaagtagcaataatattatgtacgatcaaaaattgaaaatttttgataaaaaacttttatttgattcttctatagctaaatctaaaaacgatttatatattaaaaataaagttgattctagctctaattcttctaatgaagttaaaacaatagttaatcttccctcaagtaaaaacaaaaagctaaatttaaatacttttagaattactaccaatcaagatttttttgatattagctctttggttattttagactccaaaataccaatatttgaggttgttggtgatttctattattggtatagaccaaaaaagataagtcagccaagtgagttttattcagaagattggcattctcctttaaattcctataaaaaggcaactcaacttttcaaaagttttgaaaagttggtaaattctaggtttaataaaggatcaagacttaaagataagttaataattcttgatcctggtcacggaggccttgatcctggagctattgttaaatctagagatggtcttggaaacgaagtttttgttgttgaagatgaatatgtgtatgatattgctttaaggctttatgtataccttaaagaagagggtgctaatgtcgaacttactattttggctcccgatcatttgattaggaatagtgtttttgctaacaatacttttgttaatgttaaaaatgaggtttacaatgattatgatctaaataaaaatgatactgttgattcctggataaacggtactccatcaggccttaaaaaaagattggttgttgttaaaaacattgttaataaatataaacatattaaagataaggatatagccttttttagtttgcatgcagataatagtgttggagcacctaagagtatggggttttattatcaaaaagatgacgaaaaaaaatatgatattcattcaaagtctgtagcagaaaaaattacagaaggaatgaaaagaagtttttatattaagggtcaaaatctccatgttttaagaaacaatgtagtaatgactaagcttttaatagaagttagaaatttagcatttccagaagaagcttggtctattagatcttctaagcttagagatcaagattccaaaattcttgctaatgggattttaaaaatattagaaaataat

SEQ ID NO: 59 - DNA, 1686 bp, Borrelia afzelii
atgtttagaaaactaaaaaaatcaaaaacttatattattattatttcaataactaaattttcagagaataatctgttatcgataatatcaaatataaaatatttgattgagcacaaacagttagcttacaaaatacattggacattcccaatatatttttttgaaattctaagagaacatgaggaattaaataaatggctatttgaaagattcaaaactaatacagatatatatatgcctggaacttacagtggaagccctcatgaatacatgctacacgatgaaatacatttagatttatattgggcactaaaaaatccattcaaaagtggatacaaagatatatttcaaaatactcctattatgctttacatatacaacatagaaaagtttaggaaaaaagtgactgagctttacagaaagcttaatttcaactatacagaaggaataaggcagagcaaaaataataaaacgtacttaattttttataaaaataactgccaatatttatatgaagtccaaaaaatagattctccaagaagcaatgtagaaactcttatttatttttatgaaatcaaagaaacttatgataatcaagaattaaaaaattttttactttatttaaaatctttggaaaacagcttgcatagtatcaagatacaaaatctagcaggatccaaactaactaccgaactgctagaaattccaaaatttaactctcttaaagagcaagagccaataataaattttcaaaacaaaagactcaaagattatcaaatcaacgaaaaaagtttaagagaatttttaataaacaaacaccaagaagaaattgtcagaaattcagaatcaattattcctaagaatctggaatataatatggaaggaaatttcacattatctcacgatcaatacaatattaaatttgaaaatgggaaattaaataaaataaaatttaaagataaaaaagttgaatttctaaatacatctagaacctatttcaaaattttatcaaaaaaagaattaataaaagaagcatctattgaaagctcattttccttctcaaatgaaaaaattttaggaataaagcaatatttagcttttaactccactacaaaatcaacaattgattttttcatagacgagactatctctagcttttttgtatctattaaaataaaatggccttctaaaatcaatctggataaaaaagcattaaaaaaatacaatcctgattatcttcttgaatattcagcacttgaaatacctgtttttgaaattacaaaaggcactaatttaaaaataacagcaaaatatagtgatcttgatacttatgaaaaaataataataactaaaaacaatcccaaaggctacattaacggtacagaatttttaatatctaagggaaatgataaaaatagtaatttttttataagctttttaaatgttgaaaaacaaatcattcatacaattaattataaaattgaaaaaataaattctaaaaaatggttaatcctaaacataggtggctcttataacaaagttaagatccaagatgtaataaattactctcagacactaaatttaatgatactacccttaaataataattttgataacaaaataagactgaattcaaaaataaaaaatttaattttttatactaatataaaaaaatatgaaaataaa

SEQ ID NO: 60 - DNA, 1635 bp, Borrelia afzelii
atggctaaagacatatattttaatgaggatgctagaaaaagcttacttagtggcgttgaaaaattatccaatgctgtaaaagtaactcttgggccaaaagggagaaatgttcttattgataaaaaattcggttctccaacagttacaaaagatggggttagcgttgctcgtgagattgagcttgaaaatccgtttgaaaatatgggagcgcagcttttaaaggaagttgctattaaaacaaatgatgttgctggtgatggaacaacaactgccactgttcttgcttatgctattgcaagagaaggccttaagaatgtttcctcaggaattaatcctattggaataaaaaagggaatagatcatgctgtaagtttggctgctgaaaaaattcgtcagtctgcaaagaagattacaacaaaggaagagattgcacaagtggcttcaatttctgctaataatgacagttatataggtgaaaaaattgctgaggcaatggataaagttggaaaagatggggttataacagttgaagagtcaaaaacttttgatactacgatttcttatgttgagggtatgcaatttgatagagggtacctttctccttatttttccaccaataaagagaatatgagcgttagttttgacgatgctttcatattaatatatgagaagaaaattagctccattaaagagcttttaccagttcttgagaaagttttgggaacaaataaacctttattaattattgctgaggacattgaaggggatgcccttgcagctcttgttttaaacagcgttagaggagctttaaaggtttgtgcaattaaatcgcctggttttggtgatagacgaaaagcaatgcttgaggatattgcagtgcttactggcggtgttttaatcagtgaggaactaggccttacacttgagacagttgagattgagcaacttggacaggctaaaactattaaggttgataaagataatactactattattaatactggcaataaagaacaaataaaggagcgttcagagcttattaaaaaacaaattgaagattcaacatctgaatatgataaagaaaagcttcaagagcgtcttgcaaagcttgttggcggagttgctgttattaatgttggagctgttactgaagtagagcttaaggagaaaaaacatagagttgaagatgctctttctgcaactcgtgctgctgttgaagaaggtgttgtgcctggtggtggatcaactcttattgaagttgctatgtatttagatacaatagatacaagcaaattaagctatgaggaaaagcaaggttttgagattgtaaaaagaagtcttgaagagccaatgagacagattatttcaaatgccggttttgaaggatctatttatattcatcaaattaaaactgagaaaaaagggcttgggtttgatgcttccagctttaagtgggtaaatatgattgagagtggaataattgatcctgctaaggttacaagaagtgcgcttcaaaatgctgcttcaattgctggacttttattaacaacagaatgtgcaatcaccgatattaaagaagagaaaaatacttctggtggtggcggttatcctatggacccaggaatgggaatgatg

SEQ ID NO: 61 - DNA, 759 bp, Borrelia afzelii
atgctaggagattttatgtataaattagttttagtaagacatggggagagtgagtggaacaaagaaaatctttttactggttggacagatgttaaactttctgataaaggtgtcgatgaggctatagaggcaggtttacttctcaagcaagaaggctatttttttgatattgcttttagttctttattgtcaagggccaatgatactttaaatattattttaaaagaactaggccaagcttatattagtgtaaaaaaaacttggagattaaatgagagacactatggagctttgcagggtttaaataagtcggaaacagctgcaaaatatggggaagataaggttttaatttggagacgcagttatgatgtgcccccaatgtctttagatgagtctgatgatcgtcatccaattaaggatccaagatataaatatattcctaaaagagaacttccttcaacagagtgtcttaaagatactattgcaagagttattccttattggattgatgagattgcaaaagaaattcttgaaggtaaaaaagttattgttgctgctcatggtaattctttaagagctcttgttaaatatcttgataatttaagcgaagaagatgttttaaagcttaacattcctacgggtattcctttagtttacgaattagataaagatttaaatcctattaaacattactatttaggtgatgaaaacaagattaaaaaggcaatggaatctgttgctagtcagggaaagttaagg

SEQ ID NO: 62 - DNA, 1080 bp, Borrelia afzelii
atggcaattaaaaaacgaaaattttataaaagatttatatataaggagttggtttacatgaagaggaaagcgaaaagtattttattttttttattatccactgctctttttgctcaagagactgatggattaacagagggctctaaaagggcagagcctggagaattggttttagattttgctgaacttgcaagagatccaagttcaactaaacttgatcttacaaattatgttgattatgtttattcaggtgcttctgggattgttaagccggaagatatggttgtagatcttggaataagtaattggagtgttttacttactccttctgcaaggttgcaagcttatgttaaaaattcagttgttgcgcctgctcttgttaagagcgaatccaaaaggtatgcaggtgatactattttaggagtaagagttttatttccaagctattctcaatcatctgctatgattatgccaccatttaaaattcctttttattcaggggaaagtggaaatcaatttttaggcaaaggtcttattgataacattaaaaccatgaaagagatcaaagtatcagtttatagtttagggtatgaggtagatcttgaagttttatttgaagatatgaatggtatggagtatgcttattctttagggactttaaagtttaaggggtgggctgatttgatttggtcaaatcctaactatattcctaatatatcagctagaataattaaagacgatgttcccaattatcctcttgcttcaagtaaaatgagatttaaggcttttagagtttcaaaatctcatagttcaaaagagcaaaattttatcttttatgtgaaagatttgagagttctttatgataagctaagcgtttcaatagattctgacattgatagtgagtctgtatttaaagtttatgaaactagtggagctgaatcccttcgcaaattaaaggcacacgagactttcaaaagagttttaaagcttcgagaaaaaatttctatgcccgaaggttctttccaaaactttatagaaaaggttgagagtgataaacctgaagaatcatcttcagaaaat

SEQ ID NO: 63 - DNA, 1398 bp, Borrelia afzelii
gtgcagataaaagaaatttattttggacccaaaattttagatgataaaaatagtaattctaaattgaccaattttgattttaaggttgtttcttttgagcttggatcggatcattatttagtagacattatgcaggttaaagaaattagaaaatctagtaattttacttatgttccgaatgccaaaaaatatgtagctgggcttgataatttacgaggcgaaataattcctattatagatcttagaataatgtttaatttggaatttaataaaaaagatcttgaagatattatggttttaaaacataaagaccttcttataggggtgattgttgataaaattaataatgttttttcaatagattctagtcttattcaagatccacatccagttttatctcaagattctttaataaactatataaaaggcgttgtagattataacgaaaaactttatatacttcttgatgtttttaaaatttttaattatggcgaagaagaaagggttttaacctccggtcaaaattttgttgaaaaaaccgattttgtagacgattgtggtaatttagatatcctggagaatgctaaaagtaatttatctaataatggtttttcaaaaaatactaataataatgaaaattcaactgtaaacaatattgcagcttttaatttggagaatattaaaaaaaatcttttgaaattctcgtttaatgcttctttagtaaatgatgtgtttttagaaaaagttggagtaaaatttaatatggttgatactgattgcttgccttacgatagttttttaaatgaattttattcaaaatcatcaggaaatctatggggagctgattgtttggaagaatttcaaaatgaaattgttaagaatcgcttaaattttatggataatttgaattctattttcaatatattagaaattggttgcggtaatggaagggagactatggccctagttaacgctttgtctgagtattatgtaggaccgtttaagttgacagctattgataatgatttatcaaaagtggttgaaacttccaggttgattttttcagagtcagaaattggtattagtgaaatttatcgtaggaactcttttgaacaaagtcctggagtttataaatttaagtcagaaattcttaataacgttttatttgaatattctgatgctcttttttcagatttgcctgatcatttgggaatggtttttttaaaagatgttttatgtttcttggatagtaaagatcaaattttaattttgaatattattgcttccaaaactattaaaggggctcttttgtttttaggagataatgaagaacttaaaaataatgatatttttataaaagaaaaatctacaaaatattttaacttgtacaggagagtc

SEQ ID NO: 64 - DNA, 2259 bp, Borrelia afzelii
atgctattgaagcttaaatacagttttgttggatttttattattgtttttaatttttatattattgcttttttctatgatttttaattttgttttatgtggttatttagaagattattataagcaacttacaagggcgcaattaagaagagcagctttttctacacaatcttttttggacactttgtatgttatagtcagtggtgcagcttctaatttggcacttgaaaccatatcagaatttgcaatttatgagaatagaggaaaagatttctctgagtctgaattgatagatttaagaaaaaatccaaaatttgttattgattctgtaaaggtgaataaaaaatatcgacaatacttatacaattttatggccaatcttaaaaatgataccttttttgaagaatttgcattttttgattttgaaggaagaataattgttagcacaaggcatgaaaataatatggattttggtcattctgaggctaataccaattattttaaaaaagcggttgaggattataagcaagaccaattaaaatttataggttggtattcaaatctttctgaaggaatatctgcagaggttgccattaggtctaggcaaagcgaaaaaaaggcttttgcaataattgttcctgtatattctccagaagataaacttgtttgtgggtatttggctggatatttgcttaatgatgttttggcagatagttttgatagatttagattcggtttttataaaagaggcaattttatttatgtggatcctaataatatagcagttaatccttttgaagaatacaatgaaattagtagggttagttctaaatttttaaatactcttaaagatgttttttctaagccacctcttttatcaaatattcctaccgaagtttcggtttatactattgatagaatatttttccccgaaatgggagaggaatgttattatgcactgttgcctataagtagcaaattaggagaaaaaggtggagtacttattgctagacttccttataaagatatttacggagtaatatctagcataagattccagtatgtcttatattctgccttaggcattattttattaagcattgttcttttggcaagaatagatagggttattagttttcgtttaaacgcaattagagttttagttcaagatatggttaatggaagtttagataaagattatgctcttgatgatggcgatgatttttctgatgagcttagtatgctaagtcttcgggttgtgaaaatgaaaaaagctatttctgtagcaattgcgagtgttttgagaaatattagctatgtaaataaggcaagtttggaggttgccagttcgagtcaaaatttaagctctagtgcgttacagcaggcatctgctcttgaagaaatgtcagctaatgttgagcaaatagcgtcaggtgttaatatgagcgcgaataattcttatgaaacggagcaaatagctttaaagacaaatgaaaattcccatataggcggtaaggctgttgaagaatctgttattgctatgcaagatattgtagagaaagttagcgttattgaagaaatagccagaaagaccaatttacttgctttaaatgcggctattgaagctgcaagagcgggtgatgaaggaaagggatttgctgttgtggctagtgagattagaaagttggctgatcttagtaaaatttcggctcttgagattggagaattagttgaagataactctaaagtagcaactgaagcaggagtgatctttaaagaaatgttacctgaaatagaagaaacagctaatcttgttaagaagatttcagaaggtagttctaagcagagcgatcagattgctcaatttaaaatggctttagatcaagttggagaagtagtacagtcttcagcttcaagtagtgagcaactttctagtatgtccgataaaatgctagaaaagtctaaggaactcagaaaatctgtattattttttaaaattaaagattctaagattgaaaatctggaggatggtgagtatgatttcagattaatggattgtcctgaagattcttttaaagatgaaaatcaagatttaaaaagtaatggaatttcgactttaaatggtagtaggcataataatcattctttaagtattgagtctgagccttctgtaagagctattaataagcgagttgatcctaaaaaagctatcgatattgctgataaggatttaaattttgatgatgatttttcagagttt

SEQ ID NO: 65 - DNA, 951 bp, Borrelia afzelii
atggatttgattagtttttctgtgcctggaaatttgcttttaatgggggagtatactattttagaggaaagaggattggggttggcaattgccatcaacaaaagagcatttttttcttttaaaaagagcgattcttggcgtttctttagtaaaaagaaagagatagacgatttttctttaatagaaaatagaaatgattttgtttttaaaatgtttgcttacttaaatcaaaattgttttttcaacctagaaagctttgcatatgatgtgtatattgatacaagtaatttcttctttaatgatggaactaaaaagggatttggctcaagcgctgttgttgctattggcatagtttgtggactttttttcatttataatgctactaatgttgttgagaaaggtgaaatttttaaatattgtttggaagcttacagacattctcaaggaggaataggtagtgggtatgatattgctactagtatttttggaggtgttgttgagtttgaaggtggttttgctcccaaatgtagacaactaaatgctgtagagtttaatgatttttatttgatgcagggtttgcaagcggttaaaaccaccgattctatttatgagtacaataagcatagagattctattttagattttatattaaaatgcaattcagagatgaataaacttgttttaaatgtttgtagttctaaatctgccttgatttctagcttaagaaaagctaaagaattaggcttggcaattggggcggcaataggagttcctgcagctttgcccccaagttttgcgcaccttcagtatcaatgtgatttgattaaagctttgggggctggaaatgaaacttttttagtttacaagcccaatatcgaagcttttgatttaccaaaaattattccaattgttttagagcacgaaagtattaagtttgaaagcggtaaatgt

SEQ ID NO: 66 - DNA, 1569 bp, Borrelia afzelii
atggagtatttgcaaactacatcttcaattaaagctaaatttgatattgtagctattgtggagcaatatattaagcttgttaaatcggggtctacttataaagggctttgcccttttcatgctgagaaaaccccctctttttttgtaaatcctttgcaaggatatttttattgttttggatgtaaaaagagtggagatgttattggatttttaatggatatggaaaaaatcaattacaatgatgctcttaagattttgtgtgaaaaattcggtgtttattatgatgatttaaaaataagtagagaaagtgtaaaaaaaaatgaaaataaagacatagtttcaaaaatttactctttgaattctagattaattaatactattaaattttttttgaataaaaataaaaaagctttagattacgttttaaagagtagagcaatatctaaggaagttgttgatttatttgaacttggttatttaccgcttaatgttaaagatggtttagagcttcatggctttttagtttcaaaaggatattcttctgaaatattgaaaaaaagtggtttattttcaaaaataaaccccaaagcttctattttatctcaaaggttaatttttccaattaaagattttaaaggaaacgttgttggttttgggggtcgagatttagatggaaaaggttctaagtatattaatttaagtgaaactgaagtttttaaaaaaaaggagcttctttatggattttatgaggggcttgatgagattaaatctacaaagtcagtcatattagtagaaggatatatagatgttcttgctttttttacatctgggattaaaagagcagtatctactcttggtacttctttttcaaaagaacatctggttttgattcaaagatatgctgatgagataatattttcttttgatggcgatgatgctggactttctgcaactttaaaagcttatcaaatttgtttgccatttaatattaatgttagtgttgttaaaatggattttggtcgtgatcctgcagatgttcttaaaagtgaaggtgaaagctctttgcaggaaattttaaataatagatgcgatgtttttgactatcttttagatgtttattctaataaatatgatttaaataaaactgtagatttaaatgcaatgattaatttatttttaaacttgataaatttatcaaaagtagatacccagaaaaatatttttttagacaagttaagtaataaacttggtattggtgtgacaacgttattaaaagattattataggataaaagaaagatttgcagttgacaataataaaagaaatttgtatgctcataatgatgattcttatgagaggtatctaatagtagctttgttgaaaaattttagttattttagtataataaggcgcaatattattgatagtgatttaattgacgtcgatgccagaaaaatatttatgtgctttgaaaatttatttgaaaataatgaagatttttcattaatggatttaaaaagaaattcaaaggataactataaaattagtgagttttttttgaagaaatct

SEQ ID NO: 67 - DNA, 675 bp, Borrelia afzelii
atggaaaaattagtttttaaagagaacaccatatattcaagcaaattcgatgacatctattacaacccaaagtatggacttgaagagagtttttatacatttattaaaggctgtaatttagatttagaattaaaaacaaaaaaaaatcttttaatagcggagttaggatttggaacaggattaaactttatatgtcttttaaaattcataaaagaaaacaatataacttcaaagattaattattattctatagaaaaatttccacttcaaaaaaaaacaataatgaaaatttcaaagttattcgttaaagaaaccgtttatttcaaattaatgttaaaacattatcctaaaattccaaaaaaaaatttaaaactaaaaataacagaaaatgttaatttaaaaattttaattggaaacgctaacataaaaattaaagaaattccaaaaaatgtagaatattggtttttagatggatttaatcctaaaaaaaatcctaaaatgtggaataatgaaatatttactttaatttctgagaaaagcagcccgggatgcaagctttcaacattttcttctgcaagaattgtaaaagatggcttaaaacttgccaatttcaaatatatccacatagaaaaaggatttggaaataaaagacatatgataaaagctcaaaaaaat

SEQ ID NO: 68 - DNA, 1989 bp, Borrelia afzelii
atgaaaaaaatgttactaatctttagtttttttcttgtttttttaaatggatttcctcttaatgcaagggaagttgataaggaaaaattaaaggactttgttaatatggatcttgaatttgttaattacaagggtccttatgattctacaaatacatatgaacaaatagtaggtattggggagtttttagcaaggccgttgatcaattccaatagtaattcaagttattatggtaaatattttgttaatagatttattgacgatcaagataaaaaagcaagtgttgatattttttctattggtagtaagtcagagcttgatagtatattaaatctaagaagaattcttacagggtatttaatgaagtcttttgattatgagaggtctagtgcggaattaattgctaaagctattacaatatataatgctgtttatagaggagatttagattattacaaagagttttatattgaggcttctttgaagtctttgactaaagaaaatgcaggtctttctagggtgtacagtcaatgggctgggaagacacaaatatttattcctcttaaaaagaatattttatctggaaatgttgagtctgacattgatattgatagtttggttacagataaggtggtggcagctcttttaagtgagaatgaatcaggtgttaactttgcaagagatattacagacattcaaggcgaaactcataaagcagatcaagataaaattgatattgaattagataatgttcatgaaagtgattccaatataacagaaactattgagaatttaagggatcagcttgaaaaagctacagatgaagagcataaaaaagagattgaaagtcaggttgatgctaaaaagaaacaaaaggaagaattagataaaaaggcaattgatcttgataaagctcaacaaaaattagattttgctgaagataatctagatattcaaagggatactgttagagagaagcttcaagagaatattaacgagactaataaggaaaagaatttaccaaagcctggtgatgtaagttctcctaaggttgataagcagttgcagataaaagagagtctagaagatttgcaagagcagcttaaagaagctagtgatgaaaatcaaaaaagagaaatagaaaagcaaattgaaatcaaaaaaaatgatgaagaacttttaaaaaataaagatcataaagcattagatcttaagcaagaattaaattctaaagcttctagtaaagaaaaaattgaaggcgaagaagaggataaagaattagatagtaaaaaaaaattagagcctgtttctgaggctgataaagtagataaaatttccaagtctaacaacaatgaggttagtaaattatccccgttagatgagccttcttatagcgacattgattcgaaagagggtgtagataacaaagatgttgatttgcaaaaaactaaaccccaagttgaaagtcaacctacttcgttaaatgaagatttgattgatgtgtctatagattccagtaatcctgtctttttagaggttatcgatccgattacaaatttaggaacgcttcaacttattgatttgaataccggtgttagacttaaagaaagtgctcaacaaggtattcagcgatatggaatttatgaacgtgaaaaagatttggttgttattaaaatagattcaggaaaagctaagcttcagatacttgataaactcgagaatttaaaagtgatatcagagtctaattttgagattaataaaaattcatctctttatgttgactctagaatgattttagtagttgttaaggacgatagtaatgcttggagattggctaaattttctcctaaaaatttagatgaatttattctgtcagaaaataaaattttgccttttactagctttgctgtgagaaagaattttatttatttgcaagatgaacttaaaagcttagttactttagatgtaaatactttaaagaaagttaaa

SEQ ID NO: 69 - DNA, 1068 bp, Borrelia afzelii
ttggacttgttagatttaccagaaaaagaaaagcaaattaagattaaaggagtgtttatgacaaaaccaaaaatattctcaatcactaaagaaaaaataaaaatatttttaataatagtgctaacatctacattcttattgggaataattttttcaaatgaaaacaaagtagcaaggatcctggaagaaaaatttttcgattttgacttaaatttaatttctaaaattgaaacagaatttgaaggaacactaacaaaacttgacaaagattgggtgctaacatacaacaaacaaaatattcccgttgataataaaaaagtcaattctctaatcaaagcattagacgaacttcaaaaaaataaacttgtaagtagagatcaaaaaaaacacaaagaactgggaattgaggaaaacccaagctttaaattatttgacaacaacaacaaactgttaacagaaatttttgttggaaaaccaggagaaggcgattcaagattagcatacattaaaggtagtgacgaaaatgtttacttaacaaaaaatattttcttatcgtataaaggaaattcttataatacattttcagatactgcattatttcaagaaaaaaacacaaaattagaaaatttatcatttaaaatgataagaaaattaaacaaagaaaatgaaaataatataaataatgactatgagattaccactaaagatggcctttattttttaaataaccaaaaaataacaaaagaaaggcctttaaatattattgccgaatttaaagctgatggacttgaaattgataaatctaaaatagatgactacagacttcaatacaagattgaagtcaagtggagcaataaaagtgttaacaatattgaagtttactttaataaaaacgaagaaaatgacaaagacatattaatcaaaaaagataaagacgaatattactatatgactagcaaatggactttttttgatgtatttaacttagaaaaaaaattaatagaaaaagataacatttctagtaatgataatcaagaagatcaccatgagcataacaacaacacagat

SEQ ID NO: 70 - DNA, 927 bp, Borrelia afzelii
atgataaatgtagaaaaagttactaaaatgtatggttcatttacagcgctatttaatgttagctttaaagttgaagaaggcgaagtgcttggcatacttggtccaaacggagcaggaaagtcaacattaatcaaaatcttaacatcatttcattatccaaacaaaggtaatgtaaaaatttttggaaaagacattgtagagcattcaaaagaaatactacaacaaataggatatgttcctgaaaaactagctctttatccagaactttctgttaaagaatatttaaagtttatatcagaaataaagggtgttaaaaaatttaaaaaagaaattgataaggtaataaccatatttaaattaaaagaagttgaagataagctaatttctcaactttcaaaaggatttaaacaaagagtaggaatagctggtgctttaataaatagtcctaaacttgtaatacttgatgaaccaacaaatggtcttgatccaaatcaaataattgaatttaaagaattcttaaaagaactagcaaaagaaagtacaatattattctcttcacacatactaagtgaagtagaatctatttgtaaaagaataattattgtcaacaacggaataattgttgctgatgacacaaaagaaaatattattaaaaataagcttaaagagattgaaatagaattaatagttttaaaaaaatctgaaaatgaaaaaaaatttttcaacagtaaaaatgatatttttacattaatgcaacttgaagaacaagagaaagacttaaaaatttcattaaaactatctcaaggcaaaacagaagaagatctttttaactacatagtaaaaaataatataatcttaaaagcaatgatcccaaaacatgaaagccttgaaaagatatttagcaaattaactaaggagagagaaaaa

SEQ ID NO: 71 - DNA, 327 bp, Borrelia afzelii
atggaactaaatgaataccaagaaaaagcaaaaaaaactgctaagtacaaaaataaaaaagaagaattaattttaacaacacttggtcttgctggtgaaactggagaagttgttgaaaaaataaaaaaattaggaagagacaaaaattacatcattgacgatgagtatttaatatcaattaaaaaagagcttggggacgttttatggtacttatcaactttaagcaataatttaggcattacgcttgaagatgtagcccttacaaatttaaaaaaaatacaaaagcgccatgaaaatggaacaataaatggtgagggtgatgacaga

SEQ ID NO: 72 - DNA, 1044 bp, Borrelia afzelii
atgacaatacttccaaagattgccaaagatataataaacgcatatgatcaaaaaatattgccaaatgcaattcttttactaggagaaaagttttcatcaaaaaagatcagcgcaattgagcttgcaaaaaaaatattaaacgaaaaaaatttaacaaaccccaatttgctcattttctcgaatctggatacaatagaagcaaaagcacatctttctgcagattcatataagatagcaaacaaatacttagaatatattaaaactgtaatttttacaaaatgttatttcagtaatgaaaaaaatttaaaaaaaatagagaaaaatatcaactacattaattctgtttattataaaaaagaatataatataaacataaaaaatgagcttataaaaaatatagaaaatataaacaaagagctaaatcatagtattaatgttcatgatgtaaaaaaaattcaaacttggattttttctgaaaaagaaaaatcaaaggtaatctacataaacgaaattgaaaatttatcatttaatgtacacaactcacttttaaaaatattagaagagcctccttcaaatatttactttatcttagcagcaagaaataaaaacaaaatacctaaaacaatactttcaagacttagaatctacaatttcacaaaaccagaaaaaaagttaggaattcaaaggttcaaagaaagctttctaatagataaagatataacaattgaggaatatttcgcttcattttacaaagaagaaagcaaaaaaataaaaaaagaattgacaaaaattttaaatataataaaagaaaaaaaatccatatttaatcttgaagaaatcgactttataaaagatgatcaaagttttaaaatatttttaaacgaactttcaattaacattagaaaagattttttagaaaacaagataaatattaatcaatatctcaaatacacagaacatttgaaaaatatttacagatatcgcccttataatcaaaataaaaaattaataatagaaaacttaatgctaaattacgaagagata

SEQ ID NO: 73 - DNA, 1008 bp, Borrelia afzelii
atgaacaaactaatgttaatgttaattacatttgctacaagtctattggcccaaacaaacgaaacttcaacaggactaaaagcagaacaatcatttaacaataacctgtctgaaagcgtgaaattaacagaaattgcggatatttgtcccacaaacacaatttttttaacgggtactggaatagtagtgggtcttcacgaaaaaggagactccctaaagcaaaaagaccttataagtaaaattttagaagaaaacaatacaatagatgaaataagccttaataacatagaaagcaaaaacattgcactagtaaatgttagtcttcaaataaaaggtaatacaattaaaggctcaaaacataaagcctacattgtatcaatactagattcaaaagatttaacaaatggaatacttttaaaaacaaatcttaaaaataacgagaaagaaataatagcaattgcatcaggaattataaagaacaataacaaattaaaaggatatggacatacttctgaatacaccctagatagtgtaataataaatgagaatcaaaatattaactacggttataatataattcttaaaaaaggaaattatacactaataaatagaattcataaaatattgacctctaaaaaaatcaacaacaaaatcaaatcagatagcacaatagaaatagaagtaaaaaacataagcctattagaagagattgagaatattgaaatagaaactacccctaagatattaatagacaaaaaaaatggcattatcctagcaagtgaaaatgcaaaaatagggacgtttacattttctattgaaaaaaacgatcaaaatattttaaataataacaataaaacaacaattcaaataaattcaatgaaattaaacgaattcatattgaaaaattccaacaatcttagcaataaagaattaattcaaataattcaagctgcacaaaaaattaataaattaaatggagaacttatcttggaggaagttgatggaaac

SEQ ID NO: 74 - DNA, 1182 bp, Borrelia afzelii
ttgagaaaggatttaatttttttagttttaattgttttgataatagtgggcgtagtaattttttttattagaagttcaaaaaaagagctggtttactttgagcttaatacaaagagtaatattagttttttgtttctagtagaagatcttaacaaaaatcttgtaagtatgcaagaaatttttattaatataaaaacaggaaatcttggctttttagatattccaattcatactggatatgaagatttaaaaggcaatatatcttggtttaaagatctttataaaaaaaattcttttaataagtttttgtctaaaatttatacacaattatctcatgaatcagattattatattcgttttcaaaaagaaaattttgttaggcttattgattatttggggggggttagacttcttgttaaaaacccagtaaaagtttatagttttgaggattctattttaataccctctggtacttctaattttgatggcgataaatcttataattatttgagatattttaatgatgttaatcattttgaagagagaggcgagttttttaaagagttttttaaaaaacttctttttcaaatttcagattttggcattgaaaatgatattttttttaaaatatattccatgttagatactaacctttcagaggttgtttttaagtatattgttaaaaattataaaataaataatgataaaattatttctattaatattaaagggcaagaagagatttttaaggataatgataataatttgataaaggtggttttcccttattatggaggtgctattttaaaagaatcggtagataaattgaataaagaattgattaatgaaggctcggaagaggtagtaaagattgttgttttaaatggaacaaaagttgttggacttgcaaaaaaaacagcaaatatttttaattctttaaaatttaaagttttaaaatttggcaatgcagataaaaattcttataaaaataccttgattataaataattctgataatttagaaatggctgttagagttggagaggcaattaaagcctcaaatattaagccaatttctgaagttcaaactaaaagattattagagcttgataatcttgatattaatccggatgtaatagttgttttaggagatgattttgatggaagatatgttaaaagtaag

SEQ ID NO: 75 - DNA, 1917 bp, Borrelia afzelii
atgaatggcaataataatatgaataataatggaaaatctaataacaaaaagaaaaataaaaattggattttaggacttgttgttatttttttaatttcagcgatatttatgtcatatttcataaggggaggggaaagctataaaaatgttccttatagcacttttcagagttatttggacaatggactagttgagtctgtagtaataattgataaaaatttgattcaatttgttgtcaaaggttctaactttgcaaaatcctatttttctaccagtattccttatcttgatataaatctgctttcagagctaaaaagtaaaaaagttgagcttagctcaggaaaaagccaagcttctttgattggggttttattacaaactttgccgtggattttattttttattttctttttctttatatttcgtcaaactcaaggtggtggtggaaaagtttttacatttgggaaaagtaatgctcaaaagtatgaagctggaaagaataaaatcacatttaaagatgtagccggtcaagaagaggttaagcaagagcttcgtgaagttgttgaatttcttaaaaatccgaaaaaatttgaaaaaataggtgcaaaaattcctaaaggagtgcttttggttggctctccgggtactggtaaaactttgcttgccaaagccgttgctggtgaggctggagttagtttttttcacatgtcaggctcagattttgttgaaatgtttgttggagttggtgcaagtcgtgttagagatttatttgataatgctagaaaaaattccccatgcatcatttttattgatgagcttgatgctgttggtcgaagtcgtggtgcagggcttggtggtgggcatgatgaaagagaacaaacccttaatcaactattggtcgaaatggatggatttggaacgcatactaatgtaatcgttatggctgctacaaatcgtccagatgttcttgactctgctttgcttaggccagggcgatttgatagacaagtaacagtttctttgcctgatattaaggaaagagaagcaatattaaatattcattcttcaaaaacaaagctttcaaaagatattaatttacaggtaatagcaagagccactcctggagctagtggtgctgatcttgcaaatttaattaatgaaggagctttaatagctgcaaggaataatcaagatgaaattttaatgaaagatatggaagaggctagagataaaatattgatgggagttgcaaaaaaatctatgactatcactgacagacaaaagcttgagacggcttatcacgaggcaggtcatgctttgcttcattattatcttgaacacgctgatccattacataaggttactattattccaagaggcagagcgcttggtgttgcattttcgcttccaagggaagatagactttcgatcaataaacaccaaattcttgataaaataaagatatgttacggtggttatgctagcgagcaaataaatttaggcgttacaacagcaggtgttcaaaatgatttaatgcaagctactagtttagctaaaaaaatggttacggagtggggaatgggcgaagaagttgggccaatatttttagtagatgatgaagcacccatttttcttccaaaagagttttcaaagtctaaggcttattctgagaacactgctgataaagttgacagagaggtaaaaagaatacttgaagaatgtttaaaagaggcgtcagatattcttgtagagcataaggatcagcttgttaagcttgcaaaagaacttgttttaaaggagactttgacagacaaagaagtaagggagcttttgggttttgaagctagtaaagatgaatacgatttatttgcagtagattctactgcaaaggaagtaaagggggaagatacaaaaggt

SEQ ID NO: 76 - DNA, 4401 bp, Borrelia afzelii
atgaatttggagtttttgaaaaataagacatttttattgttgattttaccacttttagtttttgttttaataattttttccattaatctatttgttcaagttcaaatttattctgcaaagtttcttgttgtaaaatatcttgaatcaaaatttggctttaagattaaatatgataatatttcaccatattttttatcatccattaaaatcgacggtttagagctaagcttggatggaaaagataaaatattaatggatgttgttagggtagatttaaatctgtttaaattaattttaggcgatgaaaatattattttaaatgtttatgttaaagggagtaatttgaattttgatataaacgattttagtttatccgatgatttgagttctagcagcgcctattccgacaatggaaatgtaattttaaataaaattttaaattatctttatagactaaatattaatttagaaaatatcaatattaatattaagctcaataagcataatagttggttgaattttaaagttagaaatttttcattgagtactgtagatgaagattttttatttagttctgtagttgattttagtgctgttaaaaatttagaaatcaatttgccagctgaaagagttgatgatggagttttagattcaactttctattttgaaggaaaattcaaaaaaggttttgaggatggttatataaactttagtttttttgaacttaaaacgagttatttttctttgcttgagcaaggattccaaataaattattcaaaaggaaatttaaaaatttttaatttacaaagggagaattttgattttaatttaagttacgataaagctaatggttttattcgattggatgctttatttttcaatgttaatcttttgaattggattaagctaaacaaagactttgaaatttataaagattattttgatataagcttaaatggtcagttggcattttcttatgattttaaagataaagatgtaagatatgcaggaataatagattcttctttaaatgcagatactataggtaaagaaattcaaggtttgcaacttaaaatcaaagggaatgatagcattgtaagcgttgaaaatgcctttttaaagcttaaaaggggagttgtaaactataaaggttattattctttaaaggacttgcttccaataggacgtcttaactttaaatctgcaaaaattttaaactttaatgatttaaatgggtatttggattttaagaaagataaaaatattttttcggttaagtctgatagttttagtcttggaaatcttagttttcaagatttaagtttaaaaacttattttttaaaggataaaatttttgttgactatttgatttatttagaaaataaaaattctcaaatttctttaaaaggagatcttaatgatgaagaattttctttcaatttaggcattaaagagtttccgctactttttttaaaagaagttgttcctagttcttatttaataaattttttcccgaagactttattttcaggtaaatatttaaatttagtttctgattttaatttaaataaatttgattatcgtaagaatagattaaaaaaattcaatttcatagtattttcaaagttggataattttaaatttatgtttgatgctagtggagaaaaaaatttttacaaatcaaacaactttgatttgcagtacaatgattacaatttgcattctagcttgtttgttgagctatttgaaagtgggtttaatattagtacgaatttttcttatttggataaaaattatcctttaaattttaatgttaattttaaaaataagtttattgttgctgaatctcctcttggcataaaattagatttcaattattttgattctaaaataatttatacccttaatgttaatggttttaaggtttacaataaaacctctgatcttttgataaatataaattttcatgggaactatttagagcttaataatgatttgaaatttagaatagataagtttaatataataaaagcttctaaaatacccgcttataattttaattttgggtttaagggcttatatgaatatgataaattgtacatttctgatgttaaatttataaacaagctttcaaatttgcaaggatatggacaattcaatttaaaagataattttaatggtagtttaaatttattttctagtttaaattcagaacgatattttttaggagttaattccgatgaatatggaagttattttttacttaaatttcaagatttagatttttacaattttaattctttatcccttttagaagggaaggttaatggtaattttttgctaaattttaaaaataatgattttaaaaattattctttgagtggatatcttgaggctgataaattaactttattgggcattcctatgcagttttctctgaatttaggattattggacaataggcttaacatatatgatataaaagtcaagcgcaataaaaaagagtttcttactggtagtctaagatatgacttaggcagctctataggcgtatctaatatggtttttaatagcgacttattttcttataagtttaatgcaaattttagaaactttgaaagtagggatgaagagcgatttggagttttgaaaaccaaaacagagggtgaattttcctttagagatattaaatataaaaatgagtttttatctaatcttacggttgaatttagcaatgattttgaaaaatttaatatggcctcaattgattatgaccttattgatgttttataccattatggtaatggagaatatagctttattttaaaagattatttacctcttagttttaattcatcaggtaaaataattaaaaataaaattcttggaaatgtcagagatattaaatttgattcaaaaataatcactaaagattttttagattcacatcctttatttaatattgacaatcattttattctttatgatctttttttaaatggtgaatttgatattgatggggatttatataatcctaatattaatggaagtttaaatattcaaaaaggattaataagtactgagtatttaagggcttctagaaagtttggtggtgatagaactttagaaatatttgatatgccagttgaaattcaggataataaaatcatttttagtaatgagtttgccctggatcggtattccaaggtttttgtttctactagtttaaatttaaattttttaagtgatactattattgattattacaaaatagatattaatgtgactggcagaacaggagtccctattaagtttgacaaaattgctttaagctttacaggttatgctttaggcaatttttcaattgaaggaaatgccgatgaaattatgtttaaaggcattttaaatatttcaaatgcttgggtttattctcttgaaagttctattgttaatttattagtaaatcccttcaagcaagcaaaaagagcgcaaacagttgatattaatgttcgagattttgatattttgactcaccttgagataaattttgacagcggtgttacttttcactggccagatagtaatatttcgtttttacaagctactatttcaagaggggataagcttgtaataaaatctgatacaaaaaccgatgattttattcttaagggagatttaaatattgcaaatggttttgttaattataataataaaaaatttatctttaaaagtggtgcttatatatcctttaatgagagcagaattaagtttgatccatggataaaggcggaggctacaaatacaattaaagatagaaatgataaactgcttgttacaataggtattgatagtcctttgagtttatggaaaattgagtttatgtcttatccttctaggagtgaacaggagattaaatatttgctctcgggatcaacaatgggaggatctgagggaggattgcgatcggcagggactaatgctgctgaaatggcaattggaatagtaagtgatattgctcttgattttttaattcaacccattgaagattatatgcgttctgtattaaacttagacttgttgagtatcaagacggatatattaaagaattctattaatagtaatttttttaaaattgggaatcctacttttgttgatgttcttgataatacaagtgttaaggtaggaaaatattttgtcgagggtgtttttattagtggaggctttggttttttaaaagagcaaacgactcctttttcaaaggatttaaattttgttattaatttgggcattgagtttgattctccattttttttggttaattatgagtttgattacaattttatgaaaaaaggtttagatggaataggaaataatataggtatttcttggaaatttaaatat

SEQ ID NO: 77 - DNA, 531 bp, Borrelia afzelii
gtgttttttttgattttaccattgttttttttattgtcctttaatgttttttcgatagatgttattaaaataggcattgttgattttgatagaattgtgattgaagttttaaatcctcaattgaaagctaatcttgatcaaataaaaaataggtatcaagaacaaataaatgggttaaatttagaacttaagaatttaaaacagatgtatgataaatcaattgctgataatgacttagacaatgcaagatcttttggtaaccaatataatttaaaagttgatgagctaaagagagtgtctagtttagcaaagaataatttagagcagcaaagattggccaatattaatagtttaaataataatagtgaatctttaagtaaaatacttcatggtattcaatatgttgcagaaattaatgggttttctttgattatgaaaaaaaataatccatatattctttaccataacagtactgttgatataacagatgatgttattaagtatcttttagaaaagtataataaaaatcct

SEQ ID NO: 78 - DNA, 837 bp, Borrelia afzelii
atgttaaaaataatcttaaaaacattaacaaaaataattgctatttcgtgcctcatagtaggatgcaccagcttaccttatagccctccaaaacaaaatctaaattacttaatggagcttttgcctgacgcaaatttatatgcccatgtaaatttaattaaaaatagatctatttacaactctttaagccctaaatataaatccgctctagggcttataaatgatttatattttagctataaaaaagaaaataacgattttgctctactaataatgggcaattttccaaaagatattttctggggaattcatagaaatagaaatacagaatcaataggtaatatatttgcaagtccaaaatggaaacttaaaaattcaaacatatacattaccccgaacagagctagaaccagtattacaataaaccaaaaagataaaactttaaaagaacataatatactaacaacaaaatatattaaggaaatagaagaaaatgaaatgtttttttggattcaagattcaaaattactgctatcagaccaaatagcaagtagtaaaaatttaatcccttttagcagtggaaccctgtctataaacagactaaatcaaaatgaatatatttttaaatccctactccaaacaaataacccatcaatattaaaaatattgtcaaaaaaactaattccaactatcttgacaagcatgagcaatctcacaatatcaagccctgtaaaagccacaataaaagatcaaaatacagtagaaatagaatttaatattcaaaaatctagtgttgaaaactttatagcaaaactagcttcaaacattcaaaaaacc

SEQ ID NO: 79 - DNA, 936 bp, Borrelia afzelii
atgaaaaaaaatattttggcaaaatacatattaatattagtaagtttattatcatgtaatataagtgcccctaatgaattaggaaacaaaaaaacagaaaaaaaaggaggtgggggtgttttaggctttatagagaaaattcaagaagagagtatagaaggtgttaaacaacatatagaaaaaagagaaaaacaaacgatgcagacggcttctgtaaaacctgttaatgtaaatagaaatttcctatattatcctcaagaagaaataaagataaaagaagaagtgttaattccaagtactgatgaagaaaaaagagtagataaagcaattagcgatgggcgtcttgaatttgataaattagtttataacgaaaataagcttaaaaatgaatttgagcaattagaatctagttttaataacgtttatgataaaatctcaaaacttaaagatgcaatacaaacagaggcgcatattgtagaaagaataaaccatataataaaaacaagacctgaaaaaagagaatatcagaatagagtaaggcagaatcagtcagaagaacgagctctaattaatttgttcaatcaattattagaaaagagaggcgatattgaggaacttcatactcaattagatagcggacttagtgaaagagcatctgcaaaatacttttttgagcaatcccaaaaaactttaaaagatgccattactcagagagtaaaaagcgaacatagaagttggtcaagaagagaatatggtggtaatttgacaagaaaggcaaatcgtgaaatagataatgctttagaacaattaaaaacttcttcttctaagataattaaagcaatggaaataaaggaaaggatagaacaacttcttcaagaagtaaaatcttttctagcttcttcaagaagcaaaatctgctttcatgagatagatttg

SEQ ID NO: 80 - DNA, 519 bp, Borrelia afzelii
ttgaaaaaaacgattattatatttgccatattggcatttctgtttaattgtacaaacaaagataatgataccaccaagctaaataatggtgcggaggaagactctcaaacactacaatctaaatcagatttagttgatgaagatagaattgaatttagcaaaacaacacctttagaaaagttaataagcaaattaaatttaaattctactgaaaaagaaacactaacatttttgacaaacttattaaaagaaaaactattagatccaaatgctggttcaaattttaaaaataccggtggggatgagagcaaaatagaagaggctatacatcaatttctatcagatctgaaagaagatgaaataaaagaaatgcttgcaaaaattaaagaaaataaagacaaaaaagaagaaaattctgaagagttaaatacttataaaaccatacttgctagtggattcgatggaatttttaataaagcagattcaaaaactgtattaaataatcttaaagacgctgta

SEQ ID NO: 81 - DNA, 840 bp, Borrelia afzelii
ttgaaaatagtcattatattcgtcgtggttttaattcttggttgttctttagataataattcaaaaatggagaatgagggtggcggttttaaagaaaatggattagatagactaggtcaagaaaaaagggctttaggttcatcgaattttaggtcattgttagatgattctggggtgggatccaattttcaaaattatgagcctttaaaagcgcttgagaataaaaataaatttattaattacaaccaaatagagtttttagaaggaacaaaatcagtcaatttgtatctttggtcgacttatattcgctgggtgaaaattaaagccagagatttgtgtgatgagcgtggaaattgtattaaagagcttaatggcattaagtattcttatcttgtttctcctattgatggaagctacatttcttatgctatgcctttaataatttttgaaactactagtgaaagtgatcctttttattctgtttctggatttaaattaataaacaaaggaagcgatataaattttaatgacaataaggggggatttttagggagaatcccaatgtctgaaaaatcagttgaatctgggcttgtaactgcgtatccttttggttctagtgattctaaaagagtggttgaggcttttactgccctttataataatggaatttggaacgatatgattgccgagattaccattaagtctaagaaccctccacaaaatgaaaaagtttacagaatttcacttgattctaagctttttaatgttactatgaaaaaaataattgaaaaatatcctaatataaaaaatacaagcttaacatttaattcgttgattaac

SEQ ID NO: 82 - DNA, 543 bp, Borrelia afzelii
gtggatataaagataaataaaaggaatttatctgagagtgttagagaagaagaacaagcgcttattcattataataagcttaaagaaaaattaaatattaattttcaaaaagaaatttattgtaaactagaagcaatgaaggttttaaaagaaattaaagataaagaatattataggctagacaactattctaattttgatgattttgcaaaagactataggcttgctagaactcaaacatataagtatctaaaaattgcaacagcaatagaagaaggtttgattgaagaaaagtatgtagttaaaaacgggattaatgagacaatttgtttacttaaaacaaaagaaagtccgagtttaaaaaaatctacccaaaatccaataaaaccactaagatttcagctcaaaaaggaagaatcttattctttttataaaaaaaatgctaagcttacgagctttcttttagaaaaaatttttttcgaagaaaaagattttttattaaaaataattaacgaatttgaaagttcaaggaataaacgaaaa

SEQ ID NO: 83 - DNA, 507 bp, Borrelia afzelii
atgattaaatataataaaattatacttacactaactttacttgctagcctgttagcagcatgtagtttaacaggaaaagctagattggaatcatcagttaaagacattacaaatgaaatagataaagctatacaagcagctaaagacgctggtgtaaatacagacgcgttcacagaaacacaaacaggtggcaaggtggcgggctctcaaataagagacgcaaaaaagctcgtcgctgacttaacaatcgaatttctaaaagcaacagaagaggaaactattacatttaaagaaaatggagcgggggaagatgaattcttaggaatatatgatttaatatacagaaccgcagaagcagtagaaaaaattgggatgaaagatatgaaacatacggttacacaggaagctgaaaaaactcctaaaactacagctgatgggataattgcgattgtaaaagtaatgaaagcaaaagtggaaaacattagaaaaaaacaaactaaagataaa

SEQ ID NO: 84 - DNA, 1584 bp, Borrelia afzelii
atgaacaaaaaaaaaatcccacttttaacgctgttaattatatttgtaaactcgtgtacaatttctaaaacaaaagatgattttatctttggagttggaattggaaacgaaccaacaacacttgatccacagttttgtagtgataaatttggcactttaattataaatgaactatttattggacttttaagaggagatcctaaaacaggtggatacagaccaggacttgcaaaaaactgggaaatttctcacgataacacttgctatatatttcatttaagagacgacatttattggagtgatggtgttaaaataacagcagatactattaaaagctcatacataatggccttagaaactgaagagagcctgccaaatattagcctattaacatcaaaaataaaaaatgcaaaagaattttacgaaacaaaattaaatccagatgaagttggaataaaagtaattaatgagaaaactttagaaataactctttctcaaccaacaacatattttcttgatatacttacaaacccaatatttatacctgttcctatccatattattaaaaagtttggaaataaatggacaagcccagaaaacatggtcacaagcgggccttttaaactaaaaagaagaatcttaaacgaagaaatatctcttgaaaagaataaaaaattttatgatgctgcaaacgttgctattagtgagcttacatttgttactataaacgacgcacgcagaatttacagcatgtatgaacacaacgaaatagatgctatttttaacaacatccccttaagccttattaatgagcttatcttaagagaagacttttattcaactgacattaaccaaattgggtttctttcattaaacacaaatgttaaacctcttaacaatccaaaagtaagagaagcattgtctcttgcgattgacagagaaacattggtttacagagtgcttgataataactttaaagcaacaagaaaaatggttcctaatattaataattataattatgggaaaaaattaaaactatacaacccacgaaaagcagaaaaacttttagccgaagctggatatccggatggaaaaaaatttccaacccttacaataaaatataataaaaatgaccttagaaaggaaattgctaattttattcaaagccaatggaaaaaagttttaaatattgatatagaaactgagcctgaaacatggaataattacgtatcaaacattttaaaaggacagtatgagatctcaataaggtcctggcaaggagattatttagatcccatggcattctttaatatgtttgaaactgaaaacactcatttttcatcttacggatattcaaatcctgagcttaacgaactgataagtaaatctaagtttgaagtggatgaaaaaatcagattagaattgtttaaaaaggctgaagaaataattattgaaaatgattacccagtaattccaatatacagcgctgcgggaaactatctttttagaaatgataaatggacggggtggaacaccaacaattcagaaagatttgccctatcagaaataaaacctttagaagat

SEQ ID NO: 85 - DNA, 648 bp, Borrelia afzelii
atgaaaggaataagtattttatcattactattattggcattttcttgcaaacaatatggtagtgttaaggcactcacagaaattgcttctgattctggagataataattctcttgtcgttagtgataatttatcagctaaagagccgattgccgaaaaagggcctactttaacatcacaggaatctgaaagattagaggctttaaaaacctttttaaaagacgcaatgggtgttaatggaagagaagataatttaaaagccgagtacgagaaatcttataaagaattttttgattggctttctaaggatgttaacaagcaaaaagagtttgtaagttgttttaacaatatttgtggcattgttactaaagcagtagatgcagacaaacaaagacgtcatgatcaaaaatccctaggttttaatgaatatgtttgtcacaaaattaaaaatagcacaggtggagctttaagtttatttttccaaaaagtagctgatgcatttggtgctgaagagtacaaaaagaaagatgatgagagcagtcaaaagcctgagaaatgcaatgaagagattttcaaagtaatcaaaagagtgtttacagaaagtgatagtaataatgaattaaaaaatttaaaaaatcatggaaatatc

SEQ ID NO: 86 - DNA, 1197 bp, Borrelia afzelii
ttgaaagacaagcttattaaaattttaaacaaatttttaatgcttgcaccactgctgattattagctgtaatgctaatatgaatacaaatgacaaaaacaaagccttaaacgaatataaattacaaaatatttcagaagtcattaagaatagcttacaaattgaatcagactttaaaaaagaacttgaagcaaatataaataaaagtacccctcctattttagaaattgaaaaaattgaacttggaaaacaagaatttccattaaaatccgaatcaaacagcgaaatcttaatcccactagaagacacaaatatagccaaatcagaagaagaaattgcaaaaatacaagaaaaattattgttaatcggggctcctgatgaaattgcagagcaagaattagacccaaataaaaagcctttacatctaaccacaatagaattcaaaatttcaagcaacgccgaagagcaagaaatacttaatccaatcgaagaagagactaacattaatatcaaagacaaaatctttgaccaaaaagaagaaaatagcactttaaacgaaagtacaaaaacctctacacaaattcaattccaaaaacaaagcacatacttaagcgaagatggcaactttataacaaaagaatacgcagaacaagttagagaatctctagataaaacactaaatgcaataaaaaatttagaaacatccaaagatcttgagattgagaatgaaattgaaaatttatcaaaagagcaaagctctgcaaacacatcaaacaacacgtccgccaataatattaatactgagaatatagaaaaaacaaaaaataaattgcttgaaaagctcaaaaaaagtgaacttatttttgaagagactaaagatcctttaggaacaagtaccataaaacaagtcctggatgctgctaacaaatggcaagaacaagaaaactcaagccaaataaactgggacttaggatcaaagtttcatccaaacccaaagctttacaacaaatcagtagcccaggagtataaagttttggctgaaaaatttaccaaagtaaaaaatgaatacaaaaacacaaaagatcagctagaagttcactctaaattaacaaccagcaatatcagcaaaataattgacgcaacaaaagagtttacaagccaagtaagaaatttaatctcattagtagaaaatgcccac

SEQ ID NO: 87 - DNA, 879 bp, Borrelia afzelii
ttgaaaaaaaataccgtttataaaatattaaagctatttacaataaccttactattctcatgttctttttattctaaatcaaacaacacagaagcaataagtgaattacaacaaaactccattgaaattaaaaactctgggattgggaaaacagaaaatcttaaaaatattcaaaacttacaacaaaaccagctcctaaacaatgaaaaggaaatggtaattaaaaactttacacaaagattaaatgaaaatgaaaaattaattcaaaaaataggaccgaatatttctatatttgctccgaaaataaataaagatgttttaaaaatcgaacccattgatcaatttagaataaataaaaacacattcccggaaaatactcaaagtcatatacttaatttaacattaaaagataatcaaattagaagattattttattcatctctagattataatgaaaataaaatcaaaaaattgatctcaatacttgaacaagcatcaagctcaactggctaccattataatgttattggcttaattttttggacaggatttaaaacccaagaatcatttgaaaaagctgtcaatcttttaactaaaaacgaacaaagacgcctaatgtttaactttgatacaaaaacagtaaaagatattcaagaaaaatttgaaaaactaatgcaaaatagaaatgattggataaaaactgtagagaaaattattgacgaatatgacaacaatatagcaaatgtcaaagctgacggaatgattttaggagaaatgttaaggcttgaatacgaacataaattaaacccagatgaaagtatgcgaattgcaaatgatattgaaacattgctaaaagcctgttgtgaccacacacactac

SEQ ID NO: 88 - DNA, 1095 bp, Borrelia afzelii
atgaaagaaattggaatatctatataccctaatgtaagccctaaaaataaaattattgaatatcttgaaaaaagtgctcattttggatttactcaagtatttacctctttactctatattaacggaaatgaatttgacgtgttcaaagaattactcaatattgcaaataagaacggaatgaaacctattattgatgtaagtcctaatattttcaaagaattggaaattgatctttcaaatcttagaaattgtacaaaactagattattttaaaaaacttggtgcttgggcaatcagattagacaatacatttacaggcattgaagaatcattaatgactttcaacgattctgaccttaagattcaacttaatataagtaatataaataaacatattaatacaataatgtattttaagcctaatataaaaaatttgctcggatgtcataatttttatccccacaaatatacaggactttcaagaactttctttaaagaaacaacaaaaatatttaaacattattcaatcccaacagctgcattcattagttctaataatgcagaagaatgtgcacgaggaaaagaaaaagaaggcgttcctacactagaatcacacagatctaaagatatagaaacccaggcaaaagatcttttcaaagaaggaatagacactgtcctaatttctaattgttttccaagtgaaacagagctagaaaaagtatcaaaggtaaacagaaacgttttagagcttaaagcagacctaaatccaaaagcaactccagtggaaaaagaaataatactagaaaatttacattttaatagaggagatattaattcttatagaattcgatcaactatgccaagagtatactacaataataagaaatttcctgtacattccccaaatgaaatcaaaaaaggagacatattaatagactcttcaaaatatttgggttatgcgggagagcttcaaatatcgctaaaagataccccaaataatggtcttacaaacgtagttggaaaaatagtcagtgaagaattatatctgcttgaaaaaatagaaccttgggaaaaattcaaaataatagaaaataaa

SEQ ID NO: 89 - DNA, 1590 bp, Borrelia afzelii
atgaaagtattgataaaaaagttaaaagccgtattatttttcaatgtaatcttatttatttcttgtgttaaggaaaatgatgggcacaaattagtatttaagttaaatattggaagtgaacctgctactttagatgctcaattaataaacgatacagttggatcaaagattgtaagtcaaatgttccttggtattttagatggagatcccagaactgggggatataggcctggacttgctaaaagttgggatctttctaatgaaggactagtttatacatttcatttaagagataatcttgtttggagcgatggagttgctattactgctgaaggaataagaaaatcatatcttagaattttagataaagaaaccagctcgtctcttgttaacattattaagtctactataaaaaatgcagaagagtattttgatggtaaagtgaatgagtctgatcttggaattaaggctcttgatgagaaaactttagaaataacgttaaaatcaccaaagccatattttcttgatatgttagtacatcaaacgtttgttcctgtaccagttcacgttattgaaaagcatgggcaagagtggacaaatcctgagaatatggttgttagtggccctttcaaattaaaatctagagttttaaatgaaaaaattattcttgaaaagaataataaatattataaatctaaagatgttgttcttgacaatattatattttttattacagacaatagcattacagcttataatatgtatttaaatgatgaactagatgcaatttttaacaatattccacccgatttacttaaggatcttaagcttagagatgattattattcaataggcactaattcaacctatttttattctttgaataccaaagtaaaaccgcttgacaatgttgaagttagaaaggcgctatctcttgccattgataggaaaactttaacagagagcgttctgaatgatagttctattcctacaagaagagcaacgccagattatattgattactcttacaaaagcaatttaagcttatttgatgttgaaatggcaaagaagcttttagtggatgcgggatatcctaatggtaaaaattttcctttattgaaagtaaaatataatacaagtgataggcagagaaaaattgctgaatttattcaaaatcagtggaagaaaaatttaaatattaatgtccagcttgagaatgaagagtggtcaacatatataaatagtcgagtaaatggtaattatgaaataataagggcagggtggtcaggtgattatgctgatcctatgacattcttaagcatctttaaaactgaaaacacagctttttcatcttatggatattcaaattccgaatatgataaacttttaataaagtcagatcatgaaagtaatatttttgaaagacaagaaattctaaaaaaagcagaagcaataataattgaaagagattttccgggtatatttattaatataatttcttctagttatctttttaggaacgacaggtggaaaggttgggagccaaatatttcggaaagatttaatttatctgaaataaagccaattaaa

SEQ ID NO: 90 - DNA, 1209 bp, Borrelia afzelii
atgacaaacaagataataaaagaagctttaacttttgatgatgtgtctttaattccaagaaaatcctctatattacctagtgaggttagcttaaaaacacagttgacaaaaaacatatccttaaatataccatttttaagctcagccatggatactgttacagaaagccaaatggcaatagctattgctaaagaaggcggaatagggattatacataaaaatatgtcaatagagactcaaaaaaaagaaattgagaaagtaaaaacatataaagcccaaaaaaccatcaacactaataaggttacaaacgaacaagaaaccaaaatgcttacaaagcaatatttagaagaacccgaaatacataaaaatacagaacacaaagaagatttttctaatgcatgtaaagatttaaatagcaagctaagagtaggagctgctatttctattgatattgataccatagaacgagttgaagaacttgtaaaagcacatgtagatctgattgtcatagactctgcccacgggcattctacaagaataatagaacttgtaaaaacaattaaaaacaagtatccaaatttagaccttattgctggcaatatagtaactaaagaagccgcattagatttaatcaatgcaggagcagactgtttaaaagtaggaataggtccaggtagtatatgcacaacaagaatcgttgcaggagttggcgttccccaaataacagcaatctgcgacgtttatgaagtttgcaaaaacacaaatatttgcattatagcagacggtggaatccggttttcaggagatgtagttaaagccattgcagcaggagctgatagcgtaatgataggaaatctctttgcaggcgcgaaagaatctccttcagaggaaataatttacaatggaaagaaattcaaatcttacgttggaatgggttctatttccgctatgaaaaggggctctaaatcaagatattttcaactcgagaacaacgagcctaaaaaattagtccctgaaggaattgaaggtatggtaccgtattctggagaattaaaagatattttgaaccaactaaaaggtggattaatgtctggaatgggttatttaggagcaatcacaatatctgatttaaaaataaattctaagtttgtaaaaataagccattcttcattaaaagaatcgcatccacacgatgtttttaaaatgcca

SEQ ID NO: 91 - DNA, 636 bp, Borrelia afzelii
atgaaaaagaatacattaagtgcgatattaatgactttatttttatttatatcttgtaataattcagggaaaggtggagattctgcatctactaatcctgctgacgagtctgcgaaaggacctaatcttacagaaataagcaaaaaaattacagattctaatgcatttgtactggctgttaaagaagttgagactttggtttcatctatagatgaacttgctactaaagctattggtaaaaaaatacaacaaaataatggtttaggcgccaatgcggataaaaacggatcattgttagcaggagcttatgcaatatcaaccctaataacagaaaaattaaaggcattgaaaaattcaggagaattaaaggcaaaaattgaagatgctaagaaatgttctgaagattttactaaaaaactagctgctgggcatgcacagcttggtatagacggagctactgataatgattcaaaagaagcaattttgaaaacaaatgggactaaaactaagggtgctgaagaacttgtaaagttatctgaatcagtagcaagcttgtcaaaagcggctcaagaagcatcagctaattcagttaaagagcttacaagtcctgttgtagcagaaactccaaaaaaacct

SEQ ID NO: 92 - DNA, 1092 bp, Borrelia afzelii
atgaaagattttttaaccaacacaaaaagtccaaattgctacaataagcatcaacataaattaatagtccttatctcaactttaaagtatgtaaacaaaaaatataaaaaatacactcaacaaaacatactctattactttaatgaaaatctaaaaagaaatggtcaaaatcccgttaagttaaagacacttcaaaaatatctttacgaattagaaaaaaaatttaaagtaacaactaattattacaaacacttggggataaattgtggtactgaaatttactacaaacttaattatccaaaaaaagagtgtcactatatgataaacaaatacttcaaagacaaaaaacattctagatttgaaaaaagagctgaaataggccttaaagacaaatttaataaaaataggtgtgtaaatttggaggagtgtttaagtaataaaaataataatataaaagaagaaaagaataaacagatagaaaagtttcaaataataaaatattccaataaatgtaactttaaatgtaaagaaattcttccttttattttatatttagatattaataaagacttgaaaattaaaatgcttaaagtctcaaaaataattgagattaaactactaaagcataaaaatatacattttaataaatcttgctttaaagataagcaaaacaaattaaaagaaattctaaaaaatacaaaaaaacaattagaaaaaaaaggatacaatcctgaacaattggaaacagaatttaaaaaaatatatgaaaattacaaattaaaaccccattttatcatcgaatatcaaaaatatgatgatttaagcaaaataaagcgcaaattagaaaaatcaattgaattaaaaaaagaaaacccacaaaaagattatgaacatataaaaacaaacattttcaatatactcattgaacaactaaaagaaaaggcaaatattgaatttataaagccaattataaaaacatatttgaatagcaaaaagaaattagaatataataaagtatttgatatatataattgcgaattattagaactaataaaaaatgaaaataattctttgatgttaaaagaagttgta

SEQ ID NO: 93 - DNA, 3243 bp, Borrelia afzelii
atgaaacttgatgaaataataattccgctatcaatgtcgatcagcaacaatcaaaagctggactcaatagcagaaactctaaaaaaaattgccgagcaaaaatttgcaagtctagataatttgaagtcaaaattagaaaaatctactgcatctggatcaaatttggaaaaagctttgaataaaagctcgcagaacgctagtaaaaacttcaagtctcttgcaaattctgtcgattctgtaaattccaaagctagtggtatgaaaagtataggcaaagttctgaaaagtgttgggaaaggcttaggaagtgtaaagaatttggcaaacaaaactggtgaagcattcaaccaaatgttggcagcttttgccccaattattatagctgtaaaggctctacaagcaattggctccacaataagtggaattttcgatggcgctatggatgctcttgatgaatttaacgaagaagtgtcaacgttttctgacatgcttggaaatgaagaacttggaaaatctttagcagaatccatgagggcttttggcgatgaaactctttttactagagacgctattgctaatgctactaaaacaatgctttcttatggtgcaactgcgagtgaagttgaagagagaattagaatgtttggggaggcagctggtggaagtagcgaggggcttgagaaattagcagaagtatattctcgtgtagaatctagtaatcaagtaaatttagaagatttgtatgcgcttcgtgacgctggtgttgatattacagacattttagcagaagaagctggtttagctggagaggcattatataaggccgcgagcgatggacaaatagggttcgaagccttaaataaggctctttctaaggctactagcgaaggtggtaaattttacggaaacaccgctaaagaagcaaaaactttatcccaagctcaacaacaaactgctaaaatgagcgaaaagcttttcttagatattgggaaagctttagagccaatgatgattggatttgaaaaagtaaaacagtttcttctggtggcgatcatggttcctttgaccaaagtgactacagcgacaatatacttaactaccaaattgggtgaacttgtggtatatctttccggcaagtggttggaaggtgtaaaaatgtggttcaaggcaatctccacaccctttgtcaaattgtttgaaggaatcaagtacgtattcaacaagctaaaagaacttgcaaaatatgtttctagtgtattcccagagcgtttcaaaagtgcattcgaaccgatcattaaatggtttcaaaaattgctggatatggcgtccaaagcatacgaaaaattcaaaaatattattactttttggaagaaatcaaaaaaggaagaagatactcccagctccgaacccgagagggacaaaaaggttgatccaaatgcaaaaaccgattacaacaaaaagattgagcaagactataagaaattgcaagacgaaatattttttgcccaaagggaaatttacagtaaagtcggcgtggagcgagaaaaagccttaagggagcttgaaaaaaccatcaagaagaaaaaccaaaagtttctaaatacgtactccaaaagatttgatgagttatcggacgagaacaagaaaattttagtcggggttgaaaaagcagtaaacgaattcaataattctaattatgattttgtgaatgagtatcaagaattactaaaagaaaaagaaagtcgtgaaagaaaaatactattaaccctaccccatacagatcaagaaagcgctttacagaaactgaatgacgaaatcaatggaaagaacaaagcgttcgtagaaaaatatggaaaaagcttcgaaactctgaacgagtccaacagaaaaattgtagccgaacttgaaaagaaagttaaggaatttgaaaaagctgctttagatcgatcttttgtcgaggctcaaaaagctctacaaaaaaacatactagccttagagtgggaaacaatgctacttccagcaaaagaaagagcaagtgctgaaaaaaagatggcatccgacattcaagcaatgtacaagaaattcgtggatgagcacaaatcgcaattcgacaatctaaatgaaaccaacagaaacgcactaaaacaaatggctgagaaagctaaagatactgcaaaaagcttatatgacaaatgtttagaaaatctagataaatttacggaatttacaggcaaaattttgaatcaggaagtgggagaaaaagccggttctgaaggctttgattatgctgcagacagtgcaacaaaggggttggttgattttgggaaaaatacgttgaaagctgttggagcatcttttggacctgtgggccaagctattgcagaaattgtcatacaaatcggagagttcctatggggatggttcaagggtgccgaaaaggccagaattaaaaaaattgaagaacaacgagataaagatttagaagaacttgaaaaacgaagcgaaattgaactaaagaagcttgaagagaaatttgatgcagaaattgcaatgagaaaagaaaaattgagtgaattagatgatgaatactctaaagaaatagagtttctaaaacaagcacaaagtaaaggccaaatatctggtgaagaatttcaaaaaagattacacgatgtacaaacagaatataaaacaaaaaaaggcatagaaaccaccaaacttactaaagtcgaagagactaaaaaactagaagtggaacgacaaaataaattttccaaactagaaaccgagcgaataaaagcacaagccgaagttgataaggtaaatactcgtatgtggtcttggtccaagtcttccgatttagaaaaggcacagaaaattttagacgaaatactaaaaagaattgcaacagtaaaatcggccggatctattgaagagataaaacttgctcgtggcggtgcacgatttgtttcaaataaaccgacatatatgccaaactcaggtgtaatgtctagtgaatttggccaacccgaattggtaagaatcactcctgcaccaatagatgaaaatctacgcaaacttgaagctaaaattattgcagaagaaattgccaaattacaaaaaagccaaagcagtacagttgtaaataatttttactataacttcaatggggatgtgcttgatgctgaaaaattagttagaatgctaaaatcaaaagaacatctaatgacatttcgaatggctgaa

SEQ ID NO: 94 - DNA, 426 bp, Borrelia afzelii
atggtaattaatgttaatttgactggcaaggtaatgttgccctatatcccagactatattagaaacagcaaggaaaagatcaaagaagaagagaaagcatatgtggttttgaaagacattaactacgggtttgtggaaaagctaaaagcaagacaaatcgaacttttcaaaaaattgaatggcgagaatggtaaaaccaattccaatgctatgattgagtcaacaagcgctcaaattcaattcgtaaaaaaaatttgggatgaaaatgtggtagaatttgtcggccttgaaaatcaacaaggagaagttatcactaaagagatggttgaaagtgacggtatcttgtttcaagacatgctttcaagtcttgcaatcgaaattaatttcctggcagatactctaagggttgagcgtgtttcaaaaaag

SEQ ID NO: 95 - DNA, 1188 bp, Borrelia afzelii
atgagactaaggcgactcccaatatacgttaatgcttataaagaaaaacctaatgctgaaattttcatatattactccagtagaggaactggtaaaacttatgatattgcaactgtcaacttagaaagaaaatttagcgttgatggaggagatacacttgcaataagaaaaaagaaaaacaaaacaacacaatcaatacacaaagaaattttagaacttttgagcatatatggcttaagaaaatttttcaatataagcaaagcaaaaattgagagtaaaagtttgatttttgggaaaaaacgagcctttgttttcgaaggaggccacgacacaagagatttgaaatcttatgcgcatttcaaagacttatggctagaagaagccaatcagtttagctccgacgatatagaaatgcttatccctacaatgagagaacaaggtggcagaatctatatgtcaagcaatccggtacccaagtcacattggctatacaaaagatacttggcaaatcaagacaatcccgctgtttgtattatcaaaagtacctatcgagacaacccatttttgaacggcggtgatgttgaagcttggcttgaaaaacaaaaacttgcatatcatggaaatgacattggatttagaattgaagttttaggagaagagtttgatttcggcactgcaagattaatcaaaaaattcaatgtttgtgaacccagtcttatttccagagctaatggcagctactacacaggggtacacatcaagggaaatagaatttgttttttagaaattcttgttggaagaatttcgtatcttccagttgtaattgttacaaacgcatgtagcaaagtgttactatcaaaagctgattatcaagctgaaattaacaatttcaagggcacttttgttcttccggctgctagagaagaactcaaatatgtattctctcgttttggtagaggcactttgcttgcaaaaaaacgaaatttgtattcactctcggattatttgataccggctaatcttagtgtagtaaacatacccgaaacaaatgatgtaatttcagagttcaacgaaactgaatattactatgatgaatctagtgcagaagacagcgaagttacaaattttgttatgcaaaaagatttgacgtacatcccggcatttctcaacgctgcatctatttttaac

SEQ ID NO: 96 - DNA, 780 bp, Borrelia afzelii
atgataagtgatgaagactttgaagaaatcaaaaaaagacttcaagccgacaacatcaaattccaatttggcgttggaactatggaagaagcaaaaaattatgttggcaaacttggcgaacccattgttgtcaaagacaaagaattatttgccatttgcaatggccaaaacactactaacagaaaatattactccctaaataagaatactaaaccccctattggtgaaaatctagaagattatctagaacatttagttaactggtgcttagaaaacacttacccagggtttttgaccgctgagtttgccaaagaaggaacactctcaagaagtaagctggtaaaagctttcgaagatactaaaaaattttgtattccagatggcagaagtcttcctgaaagttgttttgtaaaagaaaaatttggaatatcttcagcacccaatttgtcgggtagattcctacgacattacgattctggtggttacactgattctgatggttcaagaagcttgggcggtacacaagagcattctttggaaaaacattctcaccccatcgacataagcgatttgaagaaactgaaggggcgacttataaatgattactactacattagaagagattctaattggtctagtggctcaaccagttttcttacaggtatagtttacggcgacggtatatactattggaattaccctttcaaaacagaggatatgggaggtaatgaaactaggccaaaaaatacctgttacatatcattttacaggtacgattgg

SEQ ID NO: 97 - DNA, 2622 bp, Borrelia afzelii
ttggaagaacaagataatacagtccaaggaattgacttggaaagtccagaaattactggccaaaatccagaaatatcaagtgccaaagaagatacaacacaagattgtacttctttggggtttgacattgtattctacacggatgaaggtcaaatttttgaacttaccccttttgtagatatttcaagcattgtattagaagaaaaaatagtagacccaagcttaaaaacagcatcaagcaatttcagcttcagcgtaagtggcctatcagaagattttttgaatttcttatttttcagaaacgaagatattttcgtaaaagtaagcgacaacaaaaaccccgtatttacaggaattttagaaaaatttttcagcagagatttgttcaatagcaccaaaagtgtatcgttcacggtcaatgactactctagcctactaaagattgcattcgaaaatccagttcaattcccaatcaatttttcaccagactggcttttcgtatacaatcctttggcaaaagagctctcacttgtccacctaataataggaaaaactaaactgaaagaccttattgatgatgatgctagcgaagcaatacttgacaaagtccccgctgtaatcattgattgtggagaaaatgtagaaactattttacaagccttgctttacgaatttggatacgcatacactttctctccaattggtaaactaaaaattcttccaatttggaaaagtgaagtaatcaacagagaaattgaaatttgtactatagatgccgaaagttatgttatgtcaaaaagtagctccagtagctacgattcaactaaagttatttggagagaaggcaaattccaaagcaaagaagaatcaatatccaaaaaacgaccactctactcagcaccaatcaatgttgctggtaatgatggcaaactttacgttgcagttcttcaaaaaggcgtagtgtaccccgactttgcagacaaagtcggcagcagtgtttttcaagaatacgaccctagttggctagacacagtttacaaatgggacttcaaaaggcgtgaagtttggcacgaccactacgccataaatgaacatttagcaataatctcaactcataaccttgaagcaaggtttagtgccgactcctccatcaagcttgaaaataaagaatattttccaacaaaggctaaactttggtttagaaacacttctagtagtcaaggctccaaatatatttaccactttgatatctacggagatgttttctacacaatagctcaaaatgtaattcaaactgacaatgctgatgatttttactctaaaaagtttgaatacacaaccaggttcattttttccgaagaatccgcagtaagactttttgaattcctaacaaacttacgtgtcaaaggacacactattgttaattttaggtcaatgcaaaatctaaacataaccgattttgtcaaacttagacctgacaatattgggattgatcattttttccttatactttcaaaaaaaattactaactttgatctagatatcaagctttacgaatacgaaggaatcacctggggtgactacactcattacgaataccttacaacttcaactaaaatatcagtaagcgactacttgtctggggtcaacaaagttgttattgcaccgtttaattacaatggcgctgaaactttccagttcaaagctgacggattcaaagacgaagatactctaaacaccgcaattgaatttgcaaaacaagcaggacttaacaaaatcaaactcctcaacggagatttttacatttacgatcaagtaaacctaaacaatttggaaatccaaggcaaagacgaagtgacaataagaagtacggggttttcaaaacatatttttacatcagaaaaatcattcaagctttccgggattagcatatgccagcagccattaagcgagctctacattaacggaggcactctaaatcaagaagaattgtcaatgtacctagaagacaaaagctttacacatccccatggtgtagtcttctgctcttcatattcagtaaaagaaaatgccagatcatcagtctatgttacagatgtaaattttgtgtacatcaaagatgtcacatttcgttgtgctctaaacaatgcactgtatttgaaaaaagtaaaaaaaatcctgctagaagatgttgattttgactctgcaaaccaaggtttcgaaatcagtgacgctaaaaatattacgctcgtcaacaccaacatcaaaagcagcaaaaaagaatcggttgcaagcggatacaacattatgatcagggaaagttcttttgaaaacaacaacaatgcactaaaactttcgaatttctcaagcgtaaaaatactagattctcagctcagtaaaaacaaaggtacagcacttcacttagttgacattactatcgcaagactaaacaataatgtttttgtcgaaaacaaagtcggacttgaaaatcattcttttgacttaatcattcaagacacttttttgaaaaacacacttgctcttgatctatcagattcaaaaggaagaataattgatagtagcacttattcagaaaatactaaagacaaacagggggccgct

SEQ ID NO: 98 - DNA, 411 bp, Borrelia afzelii
ttggctttaggaggtaaaatgaaaataagaatgaaacatttagtaagaagactttacttgagaagggacaaaatttggcatgtttacatgagcacggaaattcaaaacaaagctaaggacaaatccattaccaattttcccaatttgaaaccagaagatttggactacgagtacgtttacaagttcttggatgagtggattcagaagaaatacaacgctaataaactgggatttactattgagaaggtagatggtcttgaatatatttgtaaggcaaaaagatatgctagtcttaagaagatattaaccaaaatttttaaagattataaagatatatttcttggtaggttgcagaaggctcctggtgttgcggcagttcccggatcgacaggtaaggggcaaggtggaagt

SEQ ID NO: 99 - DNA, 600 bp, Borrelia afzelii
atgaaagtagcgttgacaacaaatactactgaagaacaaatatataaagaatttttgcgactagggatggagcaattaatagcacaagatttatcaaaaagatattatcataatgtgcttacatatagagatttggaaaatttagaaaaacaatttggaataaagtttgataatcttatttctgaaatttcttttgtagagaaaaatttagatactaagattgatggtataaaaaatgagcttaatgccaaaatagatggtttaagtatcaaagtagataacctggacgccaagattgatactgtagagaagaatttgcaaaaagacatgtctaatttggcacaagatctacgaaaagatatgtctaatttggcacaagatctacgaaaagatatgtctaatttggcacaagatctacgaaaagatatgtctaatttggcacaagatctacgaaaagatattcaaattaatagtaaattattatcggaaaaactcaaggtaagcaacagaataataattcttattacagtattagtagttcctattgctatatctagtatggcaaatattgttatgtcgataattgacagctatctcaaa

SEQ ID NO: 100 - DNA, 3834 bp, Borrelia afzelii
atgaaaactaataacattgtaaaaacaaatgatctaaatatatctctttataaagaactatcagaagattttattaaaaaagagaatattaataaactaaaagacttttttattcttataaaaaataaactttcttcaatagatgataattcaacagaagcaaatatagaggctttattaagatctatatttgaaaaactaaattattcagtagaacaacaaaaaggtgggcaaatagaaggagtggattctagagtagatatactacttttcgaaaatgataaagacaaagtagattttaataataaattagaagaagctaaaaaaaataatgagcctattccagccgaagatatcttacttatagtagaagttaagcgtccatcatttagttttaatactaaagataaagtaaaagaagcagaagatcagctatatagatatctaaatcaatatcaaaaacattatgggatgctttcaaatggaaaagtgtggagattatatgacaaatctaaagtcctttatggagaaaaaagatatattgaatttgatttttctaaagttgaagaaaaagaagaatacaaagaacaagaatggtttgttttattcatctaccttataagaaaagaaagatacctaaagacaagcaatgtaatagagattgaaaaagaacaaatatctaaagaaaaagagataattcaaaaaactcttagagagatactttatgagaagcctgacgactctgtaatatttaaaattgcaaaaaatatatatgacaaagaatttaaagtatcagacaaggaaattacccagcatattttagctagcattcttgaagaatcaattatttttattttaagaatattttttattgcatatattgaagataacgaaatttttaagaaaatattagaagaaaataagctatacaggtcttctatatcttttagatattttttttatgatgaaaatacaaaaaataaattaggatataaaaaaataataacaatttttaatttacttgataaaggaagtgatgcaataaagtttcctatatttaatggaggattatttgcagaagacaaggttaaatatttaaataatgaaagtttactaagtattagtgagcttgaagaaatactggttaaaatacttttctttgaagaaaaaaatattaaagatgaaaaatttgtagagtattcaaagctagatcctaaaagttttggagaattgtacgagactctacttgaatatgacctaagaattgcagatactactgttcatcgtattgttgaagacggggtttatctcattcgtactgaagaagagcttgaaaataagcaagtaaacaaagttgctacatactataaaggcaatatttatcttacatctagatcgcttgatagaaagaaaagcggagcatattataccccggatgacttaactgactttatggtcatatcatcaattgaagaacagcttaaaactaagtcccctttagatataaaaatcattgataattcttgtggatcagggcattttttaatttcttgtttagattacttaacagaaaaagtatggtacgagctagataaatttgaagatgtaaaaaaagagcttgataaagaatatagagctattcttaaagaaagtgaagaatacgacgttcaagatagtataagtaaagaattggtacttaaaaggatgctattaaagaagtgtatttatggtgttgatattaatcctatttcggttgaaattactatgctaagcttatggattaatacctttatttttggaacaccactaagctttattgaacatcacataaaagtaggaaatgccctgctaggatataccaaggatgaattttttgatattacaaaaaagaaatttgaaagtggattttcgttatttaaagagagaattaaagaaattacaactattttagaagatagctatcaaaaaattaaaagtattaacgatactactaaagaagatatagaaaaatccaaaaagatatacaaagaatatgaggaaagtgaagatacagattatttaagaataatattttctttaatcaaactttattctttatcttttgacaaatctttaaaaatagaatttagtgatattacagctgtaattagtttaattgaaaatattttgggcaataaaacttctagcgaagataaagaaaaaatagaaaaaattagaaaagtaagtagctattataaattttttcactatggaattgagttcccagatattgaggaaggctttgatattgtaattggaaatcctccatgggagaaaaccaagtttaatgaatctgaatttttctcaaaacacattcctaattacagaaaactaagcataaaagaccaaaataaaataaagcaagaaatacttagtaaagacacacatcctttgaagattgaatacaatgaagaaaaaaatagtataagtactattaataatatttataaaagtgattttaaagattttactagtggtggtgatccgaatctttttagatactttattagatttaatttaaagctaataaaaccggggggcaatctaacttatctaaccccttcagctctttggagtgaatctagttctagattgctaagaaagcatatatttactaactataaacttaattatatttatcaatttcaaaatcaaaagagatttaaagatgtagtatcgctttttaaatttgtaatatttcaactaagtaataccaaattctccacatctatttttaaagcaaaatttatgatccagagtagtgataatattttgaaagccataactagagatttaaaagacaataaagacgatccttataaaggaattgaattaaatatagaccaaattaaaaaactatctcctattcaagaatcaattattgaattcaaagataatgaagaatttagcttaattaataagatgtttagtcaatttggtgtttttagtgaagaatatattgattttcaaaaaggggtagacccgagcattaataatcgtaaatctttattaaaagaatataatgatgaaaactttatatttctttattctggagccaatattcatcaatttaattcaagattttttatttgtgatgatgcaaaagaaagggctaaattactatggatagataaagaagatttaaaaaaaatattaaccaaagataaccaatgtcaaaccgaaagagtattctatagagatattgcaagaaatacagatgtaagaaccatgattagtactttgtcgcctaaaaattgttattgtgtaaattcaatgtatataaattatgaaaaaacaccaatatctatttataaaaaattatttattatatctatttttaattcacttgcatttgactttttgataagaagatttgttaatatacatgttcaaaaatcatatttatatcaatgtccaatgcctcagcccgaagaaaaagaaattttaagtaattctttatatctaaatcttgcaaaaaatacttctctactggtagctaaaaatgatccggggaactttaaatatttactttacttagaacattttaagtttagtaaagaagaagttgataaaatcttaaatctagataccaaagatgaattttttaaagaaaaagaaaatgaaaacaattttattgtagccagtctttattcactaaccaaagaagattttatggttttgcttaatgactttgaggtactaaaaaataaaaaaggagaagactatattttgtctttaataaaaggatatgagaattatttaagaataaataaacttaactcaacaattcaatct

SEQ ID NO: 101 - DNA, 774 bp, Borrelia afzelii
ttgaaaaaaaataaattaaatatcgttaagcttaacattattacagcaatattaacatcaatttgtatatcatgtgcacctcttgacaacgttaatccaaacaagctaaaaagccataccaatcctagaaagctaaaaaaaacaaaaagccataccaattcaaaaaatctagcagaaaataatcaaaatcttaaaaatgaatctcaaaatccaaaatattcaaatcaaaactctcaagaaaaaatcttactctcaaaattagaaaaaattgataaagatctgaaagatcaaaaaaaacaagaagatatacaaatagctaatattgatgcacaagatgattttctagaaacttttaaacttcaacaagatgaggtttttatgcacattacaaaaatgatattaaaaagaataatttactcatccttaaattacgaaaaagaaaaaatattgctattaaaagaaattcttgaaaaacttgataacaatgcgcaaaaccgaaaaatagctcgtacgtttcttgaaacatctagagatattcagcttctaatagaaaaaatacattcaatcaacatagaagatataagcaaaaaagaagccgaaaagctactagaaaatagggaacgtagtttaaaggcaaaacaaaattttgcaaaaacattaagcgcaaccattgacgcttatagtaaagatttcaacaaccttaaaaccaatctaaaaaatctagcaactcacataaaagataaatactaccatatttctctttatctaaccgaa

SEQ ID NO: 102 - DNA, 1056 bp, Borrelia afzelii
atgaaaattaaaagtaaatgcttagctttgggattgctttttggttttatcagttgtgatttattcataagagatgaaataaaagagaaatctcttggcttgtgtgatgaggaaagttctattttagagactggtgacaaatctgttaaaaagtctcttaataagaaaggcaaagataaggttgctagaaagaaagttgaaggtaatgctgttaaaaaagacccgtttaatcatcatgtaaagagggagtctgttaataatagtaatctatcacaaaaaaatgtgatatcggaagaagaaattttgaaaactaaattattaagagaacgacctgagactagaaaagaagaaatacaaaaacagcaagatgagcataaaaggatgcttcaaggaagtttaagttttcttagtggtgaaagtggtgaattgaaggatactattgaaagcaatgaaattgattttactatagattctgatttaagactgaagagtgatttacaagctatttcaggctcaaattctatttcatatactgatgaaatagaagaagaagattatgatcagtattctttagaagaagattattattatgatgaggaaacaagattaagtaatagatatgaatcttatctagagggtgttaaatataatgtaagttcagcaattaaaacaattgttaagatatatgataattataccttactttcaacaaagcaaacccaaatgtattctacacgtcttgacaaccttgctaaagccaaagctagagaagaagttaaaaagtttacaaaagaagaacttgaaaaagatcttaagaccttattgaactatattcgagtgagtgcaaggactgcgacaaattttgtatatgcaagagaaatatattcaaaaagaaaattagatgccattgaaacagaaataaaaaatttaattttaaagatcaaaggacaatctgatttatacgaggcatataaagcaatagtaaggtcaatcttattaatgaaagattctcttaaaataatcgaaatagtcattgataagaatggtgtttggtac

SEQ ID NO: 103 - DNA, 957 bp, Borrelia afzelii
atggaattatttgatgaaaattattatgcaaaagctgtagctaatatcataggagaagttaaagatcctattatgtataaatggtttttacccgatcaaatagaagatgttgatttgcaaatgggttatcaaagaactgtaaaatgggacgcttttctaaatgctaaccccacaacgattgccaatgaggttaatactatctcaactattggatttagttctgaagtagttagacttaattacttaaaactacagtacaaatttaggcacttaaaacaggcgtctgaaaaattttacacttcagactcatatattggggacattaataataatctacttccttttgctcaagcttataaacttgcaagtagcgaaattattaaacttattaatcactttgtactaaccggtgctgtttcaatccaaaaggatggaaaaaatcaaaaacgcttactacctaatatgtatggactacttaatatgccacatcaaataaaagaagaagttgcaagtggtgataaggataagatggataaaatatttgaaaaaattgaagctggactttcgaaattagagctgggggacgaattttctacacctatgatggtaatagttgaccctgcaacttcattaaaattggtaaaaccatattcagcagcacaaggtgcagcaatgagttgcgaaaaatgggaagatattttaattcaaactattaaggccattaataatagggaagatgtttacattgaaacttcaaacttgctaaaacatcaaatacttgtgtacccattaaacccagcgcttatcaagtttaaacctagcaagtatatgttacctacaccgaatgagcaagttgataaagactcaactgatattgctcattcatacattgattttgttttagggggtttacttgctactaagaatactattttgcaagtgaatattaaacaaagt

SEQ ID NO: 104 - DNA, 432 bp, Borrelia afzelii
atgaaaccagcactaccaaatattgcaagtataactgaagaacaaatatacaatgaatttataagattgggcatggaacaactaatagcacaagatttatctaaaagatattatcataatgaacttacatatagagatttagaaaatttagaaaaacaatttggcttaaagtttgataatcttatttataagatagacactgtagagaagactttacaaaaagacatatctaatttaaatgataagatagattttgtagaaaaaaatttaaaacaaaatcttgacgaaaaactcaaaattcatgaaaaatttttattagaaaaacttaatataagcaacagattaataattattattacaataataatagctccaatcgctatatctagcatagcaaatattattacgtcgataattactgggttttctaaa

SEQ ID NO: 105 - DNA, 555 bp, Borrelia afzelii
atgagtgacattacaaaaattaaagaagagtttgataaaaaagttgcagaaattaaagcattaatgaaaaatccgcaacaagactctggtttgcttagtaattctttagagtttagagataaaaacctaatttattctaattctggtggtgtttggactagcagcaaagacaaaatagaaaactattctgttaaagggtacccctataagcgtggagtcaagcttagttttagtattgatggtacatcagagcttgaagttgaggctggtggtggtgatgatttatatggcatatgcactgatatagatgagtttagtggtatggcaactgtaatgccgattacaaataactttacggggtatttaacatttaagaaacctggaaatgatataaaaccgggtgacaagcttcattttaatcaacatggggagcttgaaaagactactggaactgaaaaatctattaatgctatagcgctttcaaaagtacataaattaacagaagaattatttatagggcttgctagtgtttttgggaatagagctttaaaaggg

SEQ ID NO: 106 - DNA, 1059 bp, Borrelia afzelii
atgggcgacaaattcactattaaatttaagggcgttcttgatcatgcagtaacaaaaaaggctatcgaacaagatattaccaaaatggaaaaatatcttaaacctaaaaaatctagtttgggcagtactaaagatattgtaaaaaataatttgtcggataagaaaaaagaattaagcaaacaatctaagtttgaaaacttacgagaacgtgttgagaaatacagacttacacaaactaaaaagcttatgaaacagggtatgggttttgagaaagctagaaaagaggcttttaaaagatctttaatgtctgatagagataaaagacgccttgagtataaagaacttgcaaaagaatcaaaagcaagaaataaaatgatagcggcttctcaaggaaaaggacttgttgccaaaattgcaataggtagcgccctgggaaatgttattggtaacgctatgagtaaagttggaggcggacttttaggatttgctaaaaaagcagttgaggaaaaatctaaaacgaatagaactaaacttctcaatagtgcgttttttgagaaagatgaacggaatgcgattgtggggattaaaggcaagggggggattcttagcggtatgaaaggattcgagcgcgacttagaaaaagaagagtttttaaatcaagcaagtgtctttaagggtactttaagggatttaggtatgctaaatctaaataatttaaaaaaagcagtagagttttcagctgcgcttaaatctagtggcgctatgagcggcgaggatgctgtaaaagctgttaatagtctgcttagtggagagggagatgagctttttgatctactaaaaaagtcgggggttggagacaaatatatagaagatgctaaaaaagcttggcaaagtggcgccgaagtagatctagaatctagaattactatgttggttgaaatgtttaaagattttaaatcttttggccttacgaaaaaagcagatacgaaagaagagattgatagcaatttggcctcagctgagcaaactctttcaaacttaaccaccactgttttggat

SEQ ID NO: 107 - DNA, 1110 bp, Borrelia afzelii
atgaataaaaaaatgagaatgtttattatttgtattttttttacactgataatttcttgcaagaattatgcaagtagtgaagatttaaaaaatctagaacaaaatgtaaaaggaaaagttaagggatttttagatacaaaagaaagaattgtttcagatgatccaacagtatatgaaatagcagaaaaattaaaagaagaagaattaaagggtaaaaaagaaagtaaacaagaacaagaagataaagaagaattaatgcagggtgatgatcctgctaacatagatttgccttcaatattgcagacaaataatcaagatagcacaccagcattagaagcagcacaacaaattacaagtggtggtcaacaaaaagaagaagaaaaaggcaaagaagaaaaagaacaagcaaaagcagaagaagtaaaagtaaaagaagaacaaaaaggagaacaagcaaaagctaaagcggaacaagaaaaaaaagagaaagaagaaagagaaagaaaagagaaagaaaaacaacaacaagaacaacaaaagaaaagacaagaagaagaaaaaaagaaacaagaagaacaggaaaaagctaaagcagaaaaagagagaagagagaaagaagaaagacaaagacaagaacaagaagaaagacaaattaaaagcaaaatcgaaacactcacaaaaaaaatagacgagataaatagagatattgactctattaagtataaaagttggtttgtggagaatgaaaaaagactagaagtaaaggcgacagaagttagagataaagttacaggccctatatatgaccattttaccaatgatgctaatacagccatatactatacttggaatttagaggatgaagaagatttggaattaggaaaattattggaaaaattgagtaacactagaaacagtttaagaactaaattaaatgaaaacaatgcaacgtatactttggaagagccaaaattaaaagaaaatgtaaagattgaagaaattgaatcagacttagatgaactaaaatcagaattagaaaaagttaaagaatatcttaaaaacgaatctaattttaaagaaattaaagagtatatctctagcagtgatgat

SEQ ID NO: 108 - DNA, 555 bp, Borrelia afzelii
atgaacaatttagcgtacagaacatataatatagaaagcataaaaaatgagtttttaaacatagggtttagcgaggaggcaatagattttgtttttcttcataatgataattacagctttgaatatttaaaagagaaaataattgatatagagaagactttacgaaaagatatatccaatttagatactaagatagatactgtagaaaagaatttagatactaagatagatactgtagaaaagaatttacaaaaggatatatccaatttagataccaagatagattttgtagaaaaaaatttacaaaaagatttatttattttaaatactaagatagataatgtaaaaggtgaaattactaataagattgaaaatgaagtaaagaatttacaaaaagatatatctaatctagatactaagatagataatgaagtaaagaatttgagaaaagatcttaatatgggaaacaggctaatacattttatgatattaacagccgcaattctaggcccaatattaaatgctttatttatgaaatatttacaattcattaaa

SEQ ID NO: 109 - DNA, 708 bp, Borrelia afzelii
atgaataaaaaaatgaaaatgtttattatttgtgctgtttttgcattgttaagttcttgcaagaattatgcaattagtaaagatttagaaagtttagagcaatcagaacaagagttaaaaagtccaaaacaaatagaacaagagataaaaaaagaatttaatggattgttaaatattttagagaaaaaagacatatctaatttagatgaaaaagatacgaaagaaattgaaaaaacaattaaggacttaaaggatcaaatagaaaaaacggatgctaaaaaaacttctcttaaaacatattctgagtatgaaaaaacagtaaaagaaataagagaaaaattaaaggataagttaaaagataagaaagaacttgaagataaattaaaagaacttgaagatagcttaaaaaagaaaaaagaggaaaggaaaaaagctttaggggaggctaagaagaaatttgaagggtataaagggcaagttggttctactagtggagtaactcaaggccaacaaactggaaatcaagggaaagttggacaacaagcttttaaggatgttaaagaattgggtttaagtgtaagttcttctagtaagaatggtgctgatactggtgatatgtctaaaggaataatagatgatgcacttaaacagattaatgaagaacttaaaaataatggagaagaggctgtggaagaaaaaaaaataaaa

SEQ ID NO: 110 - DNA, 462 bp, Borrelia afzelii
atgaaaattatcaatgtattattttgtttatttttactaatcctaaacagctgcaatgctaatgataatgacactcttaagaacaagaataaacttactgagtcccaacaagcggaaaatggggaaaaacataattcaggccaaatagaactacaacaagaaatacctaaatctcctgaagaattacttaaagaaaaactatctgaagatcagaaaatacatcttgattggttaaaaaccgctctaactaatgctggggaatttgataaatttttacaatatgatgtatctaaaatcaaaacagcacttgaccatataaaaactgaacttaataaatgtaaggggaaacaaaatgctgctcaacaggaaaacacttttaaacagacggttcaaggggcacttagcggtggggatatagataaattcccagaacaagcaaatagtttgtgcgacattcttccg

SEQ ID NO: 111 - DNA, 567 bp, Borrelia afzelii
atgaaaactttggttggcgcttgtatagtaacattggctgtattgggttgttatttgcctgataaacagaaacaagccgttcaaactttttttaagaattcacaaagtagtgatataggttctgatgagattgttgctgatgaaattgttgctgatgggatatttgataatttaaaattatatatgactgagcataatttgctagttgatataaaaaagaccataatcagtttaaaagatcctaattatcgtgctgtacccccagtgcgtgactataatgaggagtattttaataaattctttttagatttggggtctgagcgatctaaagaattgattaagttatttggcaagataaaaaatgagcagaatgatgataaatttaaaagagaagcttattggctatattcatgtataagggatttatattcttcagatattaagtattctggtgaaaacgggaatgagtatattgttgatatgcctaggaggcccactattgatcaacaatatcttaaagtgaaggggagtaatagaacagtatgctttaagatgattattgtctac

SEQ ID NO: 112 - DNA, 333 bp, Borrelia afzelii
atgcaaaataatactattggtttagggcttaatttactatcaagcttaactaacatagctaaaactgatacaaacatagatcataattacattaatacttttagcaaggtaatagattttttctacaaaacatatatgaacacactaaaatctatggaaacagccgaatcaacaaaaatattagaagaaatacaagacatattaaaatacaatattgagataatagaggctatttctaataataaaagtaataaaattatctcctcattaaaagcaaaacgcaataaaatcatgcgggaatatattaatatccttaaaaggggtgaaaatgct

SEQ ID NO: 113 - DNA, 528 bp, Borrelia afzelii
atggaattagtatcaacaaaaaatattactgaagaacaaatatataaagagttccttagactaggaatggagcaactaatagcacaagatttatctaaaagatattaccacaataagcttacgtatagagatttagaaaatttagaaaaacaatttggtttaaagtttgagaatcttgagttcaagattgatactatagaaaagaatttaaatactaagattgatactgtaaaaagtgaacttaataccaagattgatactgtagaaaagaatttacaaaaagatatagctaatttagacgctaaaattgataatgtagaaaaaaatttgaaacaaaatcttgacgaaaaactaaaaattaataatcaatttttactggaaaaaatagaaattaataatcaattattgtctaaaaatcttgactcaagcaacagattaataactattatgtcaatagtattagtacctattgctatagctattatagggccttttgttttgtcgctaattaatggttttttcaaacag

SEQ ID NO: 114 - DNA, 471 bp, Borrelia afzelii
atgagtaatttagcctacaatactcttaaaatagaaaatataaggttagaatttttaaataaagggtttagtgaagagacaatagattttattttacttcagaacgataattacaactttgaagttttaaaagaaagaatgaattctttagaacaacaaataattaatgtagaaaacaactttcaaaaagatatatatagtttagatgtgaaaatagacagtgtaaaaaacgaacttaatgcgaaaatagacagtgtaaatgctaagatagacaacgtaaaaaacgaacttaatgcaaaaatagatagtgtaaataccaagatagatggtgtagaaaagactttacaaaaggatatatctagtttaaaaaacgaacttaatgcaagtaatagaacaatacaagtaatgttaatagcgggaataacacttgctccaattatttactctatatttaataagtattttttcaat

SEQ ID NO: 115 - DNA, 558 bp, Borrelia afzelii
ttgatgagtattaaaaataaaatgataataaccaaaagagtagagataaaggaaaatatttcaaaaatggagtcattagaagagattcataaagaggaatatttgagattaaaagataaattaaaaactctaacaacagatgacatttataataaaatagaaacagcaaaaatattgaatacaattaatcaaaaaaaattgtatatcttggatggatataaaaatttttatagttttttagctggttttaaaatagctaaatctcaagcatataagtatataaaaatagtatcgggtgtagaaaaaggtattattgactataattttattgctagtaatggtattgaaaaaacaattaagcaattagaaagtagtaatattattaagaaatctaatcaaaacccgataaaaccattaagatttcagcttaaaagacaagatagttacgatttttataaaagcaatgctaaattcacaggatttttattagataaattatttagtgatgaaaaagaaatgattaaaaaaattatgaaagaatataaagcattaaaggga

SEQ ID NO: 116 - DNA, 540 bp, Borrelia afzelii
ttggatattaaggtaaataaaagagatttaagcgataatgggaattatattgttgctgatagtgcattaaatcattataattctttgaaagaaaaattaaaaattaattctaaaaaagaaatctattgtaagctagaaactttaaaaattttaaaagaaattaaagacaatgaatattataaacttgatgggtataaaagttttgaagctttttctaaagattatagacttgcaagagcacaggtctataattatttaaaaattgctaatgcaatagaagatgggattatacaagaagaatttctaataaaaaatggcatattggaaacgttaattatattaagaaataaagagagcaaaacaataaaaaagtccaaacaaaacccgataaaacccttaagatttcagcttaaaaaacaagaaagctatgatttttacaaaaatcatgccaaatttacggcttttattttggaagaacttcttgaaaatcaaaaagattttcttaataagcttttaaaaaaatataaacaattgaaagga

SEQ ID NO: 117 - DNA, 438 bp, Borrelia afzelii
atgaaaaacagatttttttttatatatttatcatcatcttttgtttttttgtttagctgtaatggttttttgacacttgaaagcaaagaaagatcaagctttacagataaacaaagaataagtattttagagaccatcaaaaaccactataatggcgactctgaaaaaatagctagagttgacaaatattttgatcgattagaggattctcaaaaagatgtttttttacaattgttttcggctggatttgactatataaactctaaagaatcagaacctaaagaatcagaacctaaagaatcagcaaatagaagagctaatttagatgctttaaaaagtaattttgaatccaaactaaaacagcttaattacacagaagaagattttaataaattggtagacgactttaatgagtttgttgatcctaagcccacttct

SEQ ID NO: 118 - DNA, 390 bp, Borrelia afzelii
atggaaattggagaaaaaataagaaaatcaatatttgataatgcaaaaacctttgtgggattcaaagttaaaaaaaacatggagcaattgaaatcaagtgtccctggaagattatcaaatgtaacaaagattgatttagaagaaacttctttgggaatagatctaaaggtaaaagtagactcccctcttgctgaatttctagattcgggaaaagcatatggaaataactcttcaagtccaagcttagcaaaaattaggaattgggcagcatataggggtatagaatccgctgtagtacctatttggctatctctgaagaagagaaaacctaaaacccaatatacaaactggacaagcgatttagtaaaggagtctgcaaaattacttaga

SEQ ID NO: 119 - DNA, 1074 bp, Borrelia afzelii
atggtcaaaaaagttgttatttcatcaacatctataatgttatctattttctcattaagttgtgatttgcgaaaagaaaatgctggaaacaaaataggtagtgttattagttcgggaaaagattattgggataatttaggttgtaaatatttaagtggatctgaaaaatctatattcaatgcatttcctaagtctaaaaaaagtcaagtgttttattctattttaaagaaagaaaacggaaaagatgctatacaattattaattaattggggtatagattttcaaacagcaagctctattgctattagcatagataaagaattagtagagcttaagaattctcaaattaaattatccgataacgattcttatgaggtagggaatgccgggaattataatttaccttacagcagtattgacagtgataataacttattaagtgctgatagttccttctattctaatttagacagcaatgataatgcaaatacgaattatttaaatagccagaactatacatatcaagaatataccaataaacaagcacaagaaatgcaagaaatatttaagaaatataaaatttttaaagaaaatgcttataagctttcacaaactttgaataagtctacttcttatgccgaggaattaaacacaaaattatctgaaatcaatacgaaagaaaataataaatttattttaaaagcagatgatataaaagatataataagattaatagcccgaataaaaatgactcaatatacagatttgtcaaaaaaaatacttgataataacttttcaaacatagctagtgatgaagagtcagctcgttatgttcttctatataagaatactaatagtccttatcttgaagttcgaaaaatacttggcagcattttaagcaagatatcaagcatagtagggggatctaaggctaatgtagtagatattgaggactctgaaaaaattaaaaaagctaaagagtatgctcaaggtgtgcttgacatattaaaatcaatagattctggagaggccgtagaagctgttttaaataaagcaaagcagctagaaaaaaaa

SEQ ID NO: 120 - DNA, 483 bp, Borrelia afzelii
atgaggattttggttggtgtttgcataataatattagctttattgggttgttatttgcctgataagcaagaacaagccgttcaagctttttttgatgagaattcaccacaaagtagtgatatgggttctaatgagattgttactgaaggcatatttgctaatttaaaattatatgtggctgaacatcgtttgttgattgatataaaagagactttaatcagtttaaaagatcctaattatcgcaatgtacctccagtgggtaaaggctataatgaggagaattttaataaattctttttagacttaggttctgagcgatctaaagaatttattaagttgtttggtaggataaaaaatgataggaatttatttgagaaaaaagtttccctgcttttttattgtatagaagataattcttcaaatgggatcgattttaggtctattaacgcaatatttgatgaagaggagaaaggagtaataaaa

SEQ ID NO: 121 - DNA, 621 bp, Borrelia afzelii
ttgtgctatattaaaaaatatctaatttttattctattattaaaccttataaattgcaatttatccaataaaaacaaaaattcagatcaggacgacgctattattagtagtcttgatagtaatcagaaacaagctttcatattttttaaggacttagttaaaaataaacagtattcaaaagattttgatcaagcagtcgaaggcgaagaagggcctttagaatctttgaaagcacagatagaagaattaaaaaagaaaaatgagcaatatattgagctgcaaaataagcttgatcaaggatttaactgcgactatgacgatagtaaaatgaaaaaattatttgatgaacttggaaatgacaacgtgaaaaaatttcttcaacaattacatctcgtgctaaaagctattaatgatggcacgcatataagctttacatcatcaaatcttacacaaactacaaaaactttaagtgaaaaacaagaaatagtattagacgttacaaaacgtaatttatatgttcaattttatttttacagtaataatctttatagggaaggatatacttcggcaggatatttcttcaacgaagtaatggaatatcatttagcaatggataattac

SEQ ID NO: 122 - DNA, 342 bp, Borrelia afzelii
atgttagagacaaaagttaatgaaaacgatgtatataatgagctcgttagattgggtatgaataaaatattagcaagtgatttggctactagattttatcataatgaaataacaataaaggatttagagattgttaaactagagcttcaaggttttgtaagagatgaagttggcactgtaaaagatgaaattaatattgtaaaaggaaaaattaaaagcttaaaaaccgaattcgatagtaaattaaaacttcataattggatgataggaattgtattagcctctcaaggaacaatagcaggtattttagttagtctattcttttatatagtgaataaatta

SEQ ID NO: 123 - DNA, 507 bp, Borrelia afzelii
atgaaaaaaattagtctgttaatatttttgtttttatttgtagtaagtttaagtgcaaatatagaagaaaattatacagaaactaaaagagctttttctaaagaagattttaacctaataaataaaagactagataattatgattttaaaaatgagtatgaaaaaagtcatgttttttccgatgctcctagaattagaggagatttaagaaaaattggaattaaagaaaaaagtgtttttttggacgctcttgaggctattgaatatcttataaaaattaagataagtactgatagtattttcctgtctgaggatatgattagacttatagggagttatccagattcgatttttaattatttgatacaattaaattcggataaaattgattatgctgagaaatatggagataacgccagaaataattttaaaaaagattattctgaagataaagcaaatacagttaaacaaattttaaaacaaattttggctgatttgcccaaagat

SEQ ID NO: 124 - DNA, 126 bp, Borrelia afzelii
gctattaaaagacccacaataccccaaagccatccccaaaaaaacaaaaaacataagagcaaaaatggtgaaatatcaagtcttttcccctgcattttcggttcaagaatatttccaatcaacatt

SEQ ID NO: 125 - DNA, 84 bp, Borrelia afzelii
agcagattctgctgttatttgagcagcatatggagtcgactttttagcccctttaaaacccatcccaccagcacttgcccaagc

SEQ ID NO: 126 - DNA, 138 bp, Borrelia afzelii
aatctcggtgttattgccatgacaaaagagaaattttcatttgcagttccatctgagcgctttattaccttaaaaaggttcatgtcaaacaaaagctcaaatccaacagaaacaaaatcatcaaacttagcaccaaat

SEQ ID NO: 127 - DNA, 435 bp, Borrelia afzelii
cttgaaataataggggtatctgatattaaagacatattgtctccaaatgcaccagcactaaaaatagcaccagcaaccaatggaagagaaatgtttaccttatctgcaagttccaaagcaataggagcaacagcaacaatagttcccataaagcttccagtagaaaaagacaaaaaaagagtaatcaaaaaaatgccacatactagcaaattcaatggaacatatttaagaccaatatttactacagcctcaacacttcctatttctttgcaaacagcagaaaaagcaccagataacataaatattaaagatataaaaataacatcttgttgcgcacacccctcaataaatttattcatttttgctaaaaaagatcccctaaaaaaaataaatgtcaaaacaatagcaataaacatagcaaatatggggggcatt

SEQ ID NO: 128 - DNA, 255 bp, Borrelia afzelii
ggatctaaaattttacccacattgctaacaagaccatattttcttgcaagatacccatcaataaaatcagtaaattcattaaaaatgattaaaaaccaaataattccaaaaaacaaatacgaaaaaaatatattttccaaaaaaaataaaattaatatgataaaggaaagtataatcctagctaatgttattttattaggagtaataattttgatcaaattattcaatttatcaaatctccttatctcttatttt

SEQ ID NO: 129 - DNA, 258 bp, Borrelia afzelii
aggaattgtgacctctttgccaaccaaagacttatatctctcatcattgggattaacagcaatagcagtatccccaaacattgtctcaggcctagttgttgcaatctcaataaaagaagaatcatcaataaaatacttaacaaaataaagcttgccatcaacctctttatattcaatctcttcatcactaacaacactcccagatccaggatcaagattaacaagatattcacccctataaatcaaccctttagaata

SEQ ID NO: 130 - DNA, 219 bp, Borrelia afzelii
ggacttttaatttttccttcaattgcatatcctagcattttgagtttattctcttcaaagttatttggaacttcaaatgcattcaaagatatgtttgaaagattgggttcttttacttgccaagattgtttggagcttgcaaatagaggcaaaaattttacttccgtttcatctttttttacaagttctaatgagctgctccaaggaattgtagcagca

SEQ ID NO: 131 - DNA, 267 bp, Borrelia afzelii
gattttaacaaagactcaaactcttctttaaaaatattaattccttcaaggcttaaaaattctggggtcagtggagtaataacttcacacattgcaagaataattcttcgctcccaaagctcaaaactgggagataaatcaaaaattgcaaattcaaatcccaatttctccaattccaaacaaaaatcatctatcaaatatggaaaatcttgcaattcatgttgcacatctcttctaaaagttccactcggcacacatggcaaaata

SEQ ID NO: 132 - DNA, 153 bp, Borrelia afzelii
ttttttattttatcagcatgtttttttgttgctgcttcagcatcattgtcgaaattacagctatttaaaagcgaaaaaacacacatacataaaattattttgtttttcataaatattctccttaattggcttagattaagcctattattatat

SEQ ID NO: 133 - DNA, 189 bp, Borrelia afzelii
atatctttttcaatgattttaagacgatcttctttgtccatattaataatattgcgattaggaaacacagattctattgcctcttgcaccgttttccccttgaagtttttgttctctaattttcgatcaaagaagttgctactaattgctaaccgaacgtcaagctcaacactaaaatcaccaccagga

SEQ ID NO: 134 - DNA, 108 bp, Borrelia afzelii
atattagccccacaatatagaaatatacagttttcatcattgcattcttttagtaaaaatttgagattattcatatctgctgtgttcaaaccccctatgaagttcata

SEQ ID NO: 135 - protein, 656 aa, Borrelia afzelii
MKFNRFLMLFLFNFGVLLGSDTTALGHYQKAHEYYLSKRYYDAIDELVEAIKINPNYYEAYKFIASIYYSLKIYTQAQFFIEKAYKMSNEDTEYKILYANILLKNDKIDQAKKIYSEVLVKQRNNIDALVGLASIFEKNGLFIAAANYYLSILDYSQNNYSAFEHLIDIYQRLEMHDKIRHLINKVRINFLSFPDFHKRVAEFYISINNLGLAEKYALNYLALIESSYKDFGVVDAYRLLALVYLHEFKYEDAIEALQKAILVDKESDELYYLLGYSYLKFGNVEKAILNLERAKNLKKDIEFYNIALEESFFASNFRNFLKNDSNTKISKHYENEGSKAFKSLNLNKALFNTKNAVDIWPDNDSARFLLSKIYKLMNLDIMAYEQLFYLVKQRNSTDSRILDFYDVVSFDVRKSLFYKYGYKSIADFNKLYDDRMVYRMAIFTQSENKFFGANDLILRYAERVLERNLNIEIVNYNFDYNKNKDYLINNFSEGFSYSRNNNLDLFLIFDFKADILKNTATLVVNVFSGKTGIKVGSFSYDVGGVNYLSNALNSLSKDFYDYLPKKGKILQIKNDDTLINLGQVNGVVKGDIFLILKEGALNSGNRDSSFIVYNKTDILGEILIEDVSDYISRGAIKSSTFLKDYIQEGATVIVKR

SEQ ID NO: 136 - protein, 238 aa, Borrelia afzelii
MNLMLITFNEFKTGISLNDTRAEHLVKILKLKDNDKFKFGILGEKNIYHCIYKKDKKLFFKKIFKIGESNKLKKINVLIGMIRPIVAKRIIKELASIGIYEIIFFNTELTEKSYLNSKIFKNNDYEKHLIAGAMQGGVTYFPKIKIMGNLKDSLKYIKQKNFEIKILLEKNSKKNLIDIEQTNNATIIVGPERGFTEKEKQLITQYNFSSYSISPNILRTETAIIAASIITASKLINI

SEQ ID NO: 137 - protein, 315 aa, Borrelia afzelii
MKIFFVSSSSIALEVFKEIVKHYEVVGVLTLPDNPKGRGQKLSQNVIKLEAIAKNIKVFDPLILDDNILNLIRDLNPDLMLVFSYGKIFKKEFLDIFPKGCINVHPSLLPKYRGVSPIQSAILNGDCVSGITIQNMALKMDSGNILVQKNFKIKSCDTSYDISKLVSSLSPNLVLEALEKIGKGFLGIPQKSSEATFCSFFKKESGFVDFNLSAFEIKNRINACNPWPLARARLDYGDIIFHRADFLKIDLYKEKKVGEIVDFDSEKGLFVNTGEGILLLLEVQRPGRRVLDYKSFYNGSRQLIGQVFSSIGGVY

SEQ ID NO: 138 - protein, 269 aa, Borrelia afzelii
LEIEFNILEKQYKDLLTISYFKEELDANDAFLTIHSGAGGTEACDWVAMLYRMYSRYAERKKYKTELIDLLEAEGGIKSVTIEIKGEYAYGLLKSEVGIHRLIRISPFDAAKKRHTSFASVFIDPVIDEKIEIIIKPEDIRIDTYRASGAGGQHVNKTSSAVRITHIETGIVTQSQSDRSQHKNKDMAMKVLKSRLYEYYKNKEDEKNKSKQDTKKEISWGNQIRSYVFQPYNLVKDHRTKFENSNITSVMDGNIDNFIEEYLKWKSLN

SEQ ID NO: 139 - protein, 342 aa, Borrelia afzelii
MKKNQLILLLFIPQIIYAKSYFASDVFFNKYQKLNEKPKTGFYIEYYFIDDIEKLYLYKENNLIKYKTIQIIENTRKITYYDTKDTKRKEEIYDNLNNKIQEIEYGNKGKILETVNYYYENGNLISKNLKTKNQKPKSIYYSKDENGKLLKITGSDFQIWNYGINGDIKSTYFDIKKSTTKVIKYDDKKRSLDSAIIVNNKIKSKEKNQYLDEQKTVNIFEEENSKIISTYQGNNLIKEEIYKNNELIKINDFQYNSSDMMILQSTKEKDKDQYTNTKIEYEYNQDNQLKSKKIYENDTIYLKTEYHNDNEYEEEIYYNKTPALRVKHKNGKVTEEKPIGTN

SEQ ID NO: 140 - protein, 417 aa, Borrelia afzelii
MMLLKLTEITKIAYIIFKNSTNKIALIGSGISLSLVMIPLIIVYYMSSNIMTSTINKYIESEGFSTQIEYNDTNKTHQLKDRLDSFKKKYNYKDLNYFFEKRTYGIIGNNKKQGVLIRAIENKFILENKSIKLLQGAKNLKKDSILISNQIKNKLNLNLNEKIDILIPNTKNNKIMPRIKKFNISGIIETGLKDIDNNLVLISFENENLMSKKFSKSIIGVETSSNYIKNNEILKQNLETEFKEFQIKTFYELYLNKYNNLDISKKLLIFIMALIIIFASINISSSLSMLIFENKKKIAILKSIGMNNLNIKIIFLLISLTLSTTFCGIGIIIGNYLTLKISYLINFVDNVLNFFLKIFGEEYSEILNSEYYVSEFQIHLSLSFSLTLLGLYMLISILTTMIPLNIISNLKEKKILR

SEQ ID NO: 141 - protein, 144 aa, Borrelia afzelii
MDIGLIGVNSALTISAIGSALGMGAAGSAAIGAWKRCYMQGKPAPFLLIVFVSAPLTQIIYGYILMNTLYEVMMQTNPWLLLGAGLGGGFAIAVSGFAQGKAAAGACDAFSETGKGFATYLLVLGLIESVALFVMVFLMIFKFV

SEQ ID NO: 142 - protein, 575 aa, Borrelia afzelii
MNTKGKVVGVNGNLVTIEVEGSVSMNEVLFVKTGGRNLKAEVIRVRGNEVDAQVFELTKGISVGDLVEFTDKLLTVELGPGLLTQVYDGLQNPLPELAIKCGFFLERGVYLRPLNKDKKWNFKKTSKVGDSVIAGDFLGFVIEGTVHHQIMIPFYKRDSYKIVEIVNDGDYSIDEQIAVIEDDSGMRHSITMSFHWPVKIPITNYKQRLIPSEPMLTQTRIIDTFFPVAKGGTFCIPGPFGAGKTVLQQVTSRNADVDIVIIAACGERAGEVVETLKEFPELIDPKTGKSLMDRTCIICNTSSMPVAAREASVYTAITIGEYYRQMGLDILLLADSTSRWAQAMREMSGRLEEIPGEEAFPAYLESVIASFYERAGIVVLNNGDIGSVTVGGSVSPAGGNFEEPVTQATLKVVGAFHGLTRERSDARKFPAISPLESWSKYKGVIDSKKTEYVRSFLVKGNEINQMMKVVGEEGISNEDFLIYLKSELLDSCYLQQNSFDSIDAAVNSERQNYMFDIVYNILKTNFEFSDKLQARDFINELRQNLLDMNLSSFKDSKFNKLEHTLSELVNFKKVI

SEQ ID NO: 143 - protein, 398 aa, Borrelia afzelii
VMKKVAIIDGLRTPNTKFGGSFRGLDIIDESSKVVKALLGRNKLCEVDEVIIGNVISAGLGQNIARQIALKSNLGDTVPAFSVNKVCGSGLKALELAFNSIVLGNNDIVLAGGVEDLTNSPYLLPRKIRFDGLKFGNFELEDSIQKDALIDSLNFISMGLTAENLSEKYKITREMQDEFAYNSHVKALKARELGYFEDEIYPLTVFDKKTNSSRVVSSDEEIRDNVTLNKLASLNPVFKELGTVTAGNSSSLNDGACFLILASEEKAKSLGISPLAYIGGFKSVGLDPLYMGFGAYAAIEGIISKLSLNPSEIDLIEVNEAFAAQALSIEKALFKKYNITSDIININGGAIALGHPFAVSGSRILLTLSRSMKMKNKAKGIASVCVGGGQGISSFLYR

SEQ ID NO: 144 - protein, 553 aa, Borrelia afzelii
VRMENQKDLQENYLKVLERVELGSRVSGTIVNIMKDYVLVDVGYKSEGFIKIEEFENVPKIGDKLEAIVVRIGGELGLILSVEKLDSLNFQDKVNEYIQNKKVIKGKVLVELSNGYKIQINENVSGFMPFYLSSKSKDEKLKRGSIVEFYILEASETDGLRLILDRRTLERERELAKRIELVSSYNEEDVVDGMVDRITEYGAIIKIKNFVTGILHKRNIAFNQVENIEDFIRVGDKLKLKIIKINPQTGKMELSLKALKANPWDSVDVKYKIDSIVKGKVVKILPFGAVIELDSELSGFLHISNFSWIKVVKSPQELIKLGQMVEVKILEIDKENQKISLGIKQINENPWERLTEKYPIGKVIQGVVTNITKTGAFVNIEEGIDAYVSKFDISWLEEIDPEEYFKIGDLVNGKVLEVDRRKRNVRLGIKQLEESPWEDFSKSYKKGDAIEVEIVEKKSKGFQVRVYNKIMGFISKIQLGDTKESSLETFEKLSIGDKLKVVITNIDSKDKSVLLSYREYENQKSREEISSYLFKGNDEESYKPFENLLKRDE

SEQ ID NO: 145 - protein, 628 aa, Borrelia afzelii
MTKRLNNKYRTKTILTIFLGITLLTVYKYFTLMVFNNSPDNIISLKSNDIVKRGTIYDRNGKPIAFSSKSYSIGTNPQKIENIVSTSETLGAILQIDSRILKEKLSSNKGFLYIKRKIKREESDLIKRIQAEGRLSNITLYPDYTRIYPFRYTTSNITGFVGIDNLGLEGIEFSLNSILGTDKTRQQFLNEELETNNIYLTIDMNIQQGVSKIAEKYFKENNPESLITLVMNSQNGEILSMVQFPQYDANFYSEYPEEIRKNLSSSLTYEPGSINKIFTVAILLESGKLNLKEKFLDNGIYQKQFPSGEKITIKTLNPPYKYIDSTEILIYSSNVGIAYITEKVSNEYFYKKLLDFGFGEKVGFPFPGETKGLLNHYSKWSGRSKATIGFGQEIGVSAVQILQAASILGNNGIMLKPRIIKKISTDKGESIQEFDKEEIKRVISKNSAQKVLKMMREVVNKGGIPNLKIKNLDISAKSGTSQAIDRKTGKYSEEDYTASILAIYPTEQPKYIIYIVYRYPKKIIYGTRIAAPMAKEIIEFIEYQQNTNAYKKIKMPSKIKIPKTDTNYKNKEYLPNFINLSKRESIDILKYYENTIKIKINGDGFVYKQSISPNTKLEDIAELELYLK

SEQ ID NO: 146 - protein, 336 aa, Borrelia afzelii
MIINHNTSAINASRNNAINAANLSKTQEKLSSGYRINRASDDAAGMGVSGKINAQIRGLSQASRNTSKAINFIQTTEGNLNEVEKVLVRMKELAVQSGNGTYSDSDRGSIQIEIEQLTDEINRIADQAQYNQMHMLSNKSASQNVKTAEELGMQPAKINTPASLSGSQASWTLRVHVGANQDEAIAVNIYSANVANLFAGEGAQAAQAAPVQEGAQEEGAQQPTPATAPTQGGVNSPVNVTTTVDANTSLAKIENAIRMISDQRANLGAFQNRLESIKNSTEYAIENLKASYAQIKDATMTDEVVAATTNSILTQSAMAMIAQANQVPQYVLSLLR

SEQ ID NO: 147 - protein, 665 aa, Borrelia afzelii
MASGFFVPGLESKYNTKEIRESMLKPDKAKIDSSFKKLESLEQEKSAWQLINRKISTLNSLAKELTSLNSPFNLMSGNSSNSEVLTLSTRYGSKNETHKLIVDQIASADVFLSSNFDPKKVTIPEGEYVFLVGKKEINVKSNGNIDLLVRDINNKGKGFLSAKIVKSDKNGNSRFILQSLKEGKENKLIIKGEGLAFAKQIGILSELKTNFNPNLSDIVVNQSSSNNRLAFENNNLVLNPLSEVSIEIPEDIEITSRSKIKFEVKYFDTGLEESDSKIIFNPGEATFKDAKVDSEDSVVDLGSDLKTPLEKKYIQMNMVKISSKEGSLELPLINISNNFEEVEVDIGALSNLEEINIENKANNKVVVISNVEVFDPKNRDGYLPINAKSFAENAKIKFDGVDVERDSNVINDLVPNVTLSLKKASSDMVEAKVEPDYEGIKRILLDFIGAYNEVLAEINIVSSNEDQLGNQKSSIVEELTYLSESQKEEAYKNLGILRSEFLLKNLKSRLESIIFKPYVTSDPNFSIINQIGVFTNSISSSGGLSRYLRLDEKKFDESIRNNIDNVRELFLFDLNGDRVYDNGIAKMLGDCLSPFVTSGGVIYNKIKNYDLKIIDQKNKVEDYKKKYDDRERKIEGELNTLDFTVKRMKDQENTLKAFDFNQRNR

SEQ ID NO: 148 - protein, 401 aa, Borrelia afzelii
MLNFCLFNSKSVLTGNDKLDNSAVLIKDNKIFDIVTSDRLKKMDLREYQMIDTKGNYITPGLYDSHIHGFHGYGTDQCSTESILKMSEHLAQYGVVGFLPTLYPRPIDEMIQIIKACTAAIGKEKGAKILGLHLEGPFFSPEKRGAHPVSYLHEPSIKVMQKLIDAAGGIFTGSNGKRKTHIKTMTVAPELKGMRELAIFCLENNINLQAGHTNAKYENMIEGFQVGILHTTHFFNAMSKLDHRNPNAIGAVLIHGDVSCEIIADGHHIHPKLVLMLRKLKDISKIVLVTDGLTPNFQTSGKLIANGDEVYIAEDGLFHSVKSNTIAGSTLTMIQGLKNLIEFGYSLSDAVQASSYNPTRILNIDKKGLICHGYDANINVLDKDFNLKLTMIESKIIFNNL

SEQ ID NO: 149 - protein, 627 aa, Borrelia afzelii
VDSTFSGIEIGKRSLFAHKDAMNTVGHNLSNATKPGYSRQRVTMKTAIPLYAPQLNRAKKQGQLGQGIVVQSIDRVKDELLNTRIIEESHRLGYWTSQDKFTSMLEDVYNEPEDQSIRKRLNDFWESWHDLANQPQGLAERKIILERGKSFCEGIRSRFHSLERIYIMANDEIKITTDEANNYIRNIANLNKQISKSQAMKDNPNDLMDARDLMVEKLGNLISVSIENKQNPNEFLIHSEGRHLVQGSIANEFKLEATNGPTRTRWNILWANNDKVHLKTGKLGALLNIRDEEIKNEINELNNLAANIIELVNEIHETGHGMDKKSGRSFFYQELKLTDDRGRYDTNGNGQFDSVHIFKINSTNEIFPEEKLGFYGTLKFETTNSNEIVEIPYNAPDTVQDVINRINNSDAQVTARINSEGKLEIKAVKEQENENITFRIKHIEDSGLFLTKYTGILNESGPEGAYDYKNIDTTDKLTPKSTYSISPLKNPAAWIKVADTIDSDPSKIASGIKNLTNEISIGDNQAALRISSFGNSQIMIGKNLTLNDYFANTASNIAIKGQISEITKESQSQILKDLTDLRMSISGVNKDEELANMIEFQQAFIAASKFITVSAELIDTVINKMGV

SEQ ID NO: 150 - protein, 251 aa, Borrelia afzelii
MLENKMTGPKTLVVIAILAILTQGCKKYSIIEKQFDYAIIFSDATEYFFEIQKTPFIKNKILFINDKNLEITKDKLKTTKKILLTHKSTNEILNNEILKEKIFHLSKIKFSLKKSIDLLLNGKSIDLQKTLLFRDKSLNNEDLEYLEKKSQEKNINITLINEANISYIKTFITPQIQTIILFSLRDNNIILKKISNSPFFKNIKFVLIGNTRKDLKIIKLKYLITLKESDLMKIVKEVEKNFQYEFNIYKQ

SEQ ID NO: 151 - protein, 361 aa, Borrelia afzelii
VKKNLMLIFGGVSFEHEISCKSAYSVYLALLDLNKYNIYSAYIDKCTGIWYLLDSVSDPPKPIDTDVLPIVSLLPGFGIFSNNKNLEIDVVFPVVHGRIGVDGAIQGVLKDMDIPCVGAGIIGSAISSNKYFCKLLLKSFNIPIVPFIGFRQYDYSLDKEEIKRNVKEVLGYPVIVKPAVLGSSIGINVAYSENQIESCIEEALKYDLTIVIEKFIEAREIECSIIGNEKMKIFSPGEVVVQDFIFYDYDAKYSVIPGNSIIFNIPAHLETNQLLSIKEYAFLVYKNLELRGMARVDFFVEKKSGTIYLNEINTIPGFTDISMFSKMCSHDGLQFKDLIDNLIDYAFQSYINRKKRINFKD

SEQ ID NO: 152 - protein, 1067 aa, Borrelia afzelii
MNKKRTNFSVLLLLIFLLILSFGGFGYYIYQSKLNDKNREIMLNEVKNSVIDRNYKKAYSVAKLLQDKYPQNEDIAMLTNTLAEIANSSPFESNDLQRDSANQILDKIKVQGNVKTNVNENFDIAFNNRYIKDSTITENYSDRNDDVGIEDEDISEFKKSKIPEKINQNTQPKKEDQTIQHPNPKLNVNDQKNLFSLEKLKKNLSENSNNENILNNPQKIENNTQNTNLPKEKNSEHILKTLDNNKYLNNNNAISLKEMPSNSKEESDLSPPSQTIIGKIHRPYSYLIKKELYEILDNINTGRVTLGKNRLKELIKKGLSNKFQKVNELIESLKTKEASNLLLTLIKKDIEPNLIDIPKDPYKKDIFQLNKEKEDNRIQHLEDLKSKVYSIKPGDLENSKTRQQAIKDLNEFLITNPNDAYASKTLAQANKIQQLEDLKSKVYSIKPGDLENPKTRQQAIKDLNEFLITNPNDAYASKTLAQANKIQQLEDLKSKVYSIKPGDLENPKTRQQAIKDLNEFLITNPNDAYASKTLAQANKIQQLEDLKSKVYSIKPGDLENPKTRQQAIKDLNEFLITNPNDTYASKTLAQANKIQQLEDLKSKVYSIKPGDLENPKTRQQAIKDLNEFLITNPNDAYASKTLAQANKIQQLEDLKSKVYSIKPGDLENPKTRQQAIKDLNEFLITNPNDAYASKTLAQAYENDGDLLKAESVYDKITKLTNAKEDYYKLGIIRFKLKKYEHSIEAFDQTIRLDPKHKKAHNNKGIALILLNKNKQAIESFEKAIQIDKNYDTAYYQKGIAEEKTGDMQQAFVSFKNAYDLNKKLNYALKAGIVSNNLGNFKKSEEYLGFFNDNVKKPNEIAIYNLSIAKFENNKLEESLEIINKAINLNPEKSEYLYLKASINLKNENYQNAIPLYNLVIEKNPENISAYINLAKAYEKSGNKTQAISTLEKIINKNNKLALNNLGILYKNQKNYQKAIEIFEKAIINSDIEAKYNLATTLIEINDNTRAKDLLKEYTKLKPNNPEALYALGIIEYNENNNDQTLRELIKKFPNYKKNGNIKKIIGI

SEQ ID NO: 153 - protein, 280 aa, Borrelia afzelii
LMKKFIILIFMLSTSLLYNCKNQDNEKIVSIGGSTTVSPILDEMILKYNKINNNTKVTYDAQGSSVGINGLFNKIYKIAISSRDLTKEEIEQGAKETVFAYDALIFITSPEIKITNITEENLAKILNGKIQNWKQVGGPDAKINFINRDSSSGSYSSIKDLLLNKIFKTHEESQFRQDGIVVKSNGEVIEKTSLTPHSIGYIGLGYAKNSIEKGLNILSVNSTYPTKETINSDKYTIKRNLVIVTNSKYEDKNATQFIDFMTSSTGQDIVEEQGFLGIKK

SEQ ID NO: 154 - protein, 408 aa, Borrelia afzelii
MKVMQDPRLSKYKNTKNLSKKTVEEIDTLSLNKNFSDSEIQGSMLRSWINLIKGNKNKTPIEFKSNNINDLKPGFIRKESKVTKIAKYFLAIGLEKSAKIMSELDDSDIILIICVVFKINYIAPEEKDRIIKEFEELLRNEKRYVKVDNNFAYDLLNKTLGKSKAKSIYKKVTGNDIFIPFDYLSQIEHEQLWALIKDDNIKTLVILYNYLNKDQKKYVFSMLGEEKRREFVKDLAKARQLSMETIEAISNKLKDRFKMQGRLKTDKLDGSKIFVDILSYMDSNEEKNLLNKINMQDLNPAVDNEIREKIFDINVILRIMDNDLHNILREFTDKEIAIIIKDKTDEVRDKMLSNVSKRRKEIILDEEAFLGKISQKDLKTMTLFFINYIKNLTLKGDLTIYRKNEEFI

SEQ ID NO: 155 - protein, 668 aa, Borrelia afzelii
MLIFGFVGLFFFNFFNLHAQGIVTNKDAQEEFKWALNSYNNGIYDDALLSFKKILSFDPNNLDYHFWAGNVYYRLGYVEEALMEWRNLKDQGYKVPYLRHLISTIEQRRGIFSNYELKFKKLVKVASLDNSIYKRPHGYQITSLRADKYGGYYAANFVGNEILYFDVNNNVNALVKDGFSYLKSPYDVIEANDLLYVTLYSSDEIGVYDKVLGVKRRSIGKKGTKDGELLAPQYMAIDKRNYIYVSEWGNKRVSKFGLEGDFILHFGYRTSGYKGLLGPTGVTYLNENIYVADSLRNTIEVFDTSGNHLYSVFTSIEGIEGLSSDSVGNNVIVSSKDGVYKYNIAKKTITKILKADKLNSKISSSILDANNQMIVSDFNNAKVSVYKSDSSLYDSLNVDVRRIVRLGGPKIYVELNVSSKSGLPVVGLKSENFSIANENYYIVNPKVAYNVNASKDINIAVVFDKSSYMKNYDLDQIMGLNTLIESSKNKNFSFINATNVPIIDNIESLTNSIKNTSSLGPYSTDTVKTDVSLKLAGSGLMSKSSRRAVVYFSGGVLNRKAFEKYSLDTIVSYYKNNDIRFYLILFGNGLVDSKLQYLVDETGGAIIPFSSYEGVSKVYDLILEQKTGTYLLEYYYPGPQEPNKYFNLSVEANINQQTGRGEFAYFIN

SEQ ID NO: 156 - protein, 257 aa, Borrelia afzelii
MKRLFLLYFLCSFVFLNLFAQGNSSYVDKQKELAIFYYEVGQRYINVGKIKKGKLFQAKALKIYPDLKKGVDIKLAVKELDARIKDGNSKVVMLEDVKLEEIPGIVHEKIEINDFTNAPKIEYIAQRERSKNQDKIIKFQFGKFARALISQNFDLFDSVIANKVNVMGQFESKNDFISALSRASSKVDADELEYLSVDDYYDLKSLKISKSNDTSFAVNVNAKKNDVTKNFSFWKEHQTLIFTKEDDNDNWFLSSIK

SEQ ID NO: 157 - protein, 442 aa, Borrelia afzelii
MMRSLYSGVSGLQNHQTRMDVVGNNIANVNTIGFKKGRVNFQDMISQSISGASRPTDVRGGTNPKQVGLGMNVAAIDTIHTQGAFQSTQKASDLGVSGNGFFILKEGGNLFYTRAGAFDVDSDRHLVNPANGMRIQGWMARDLEGEKVINTASDIEDLIIPIGDKEGAKSTKNVTFACNLDKRLPVIQEGASSADIARGTWVVNKSLYDSFGNVSVLELRVVKDPNTPNLWNATVLINGEQNSNFTLGFDNEGALASLNGQPSQKGDVLQIPITFNVLGANVGEVGEQQTVNLKLGTVGSYTDSITQFADASSTKAIIQDGYGMGYMENYEIDQNGIIVGIYSNGIRRDLGKIALASFMNPGGLAKSGDTNFVETSNSGQARIGETGLAGLGDIRSGVLEMANVDLAEQFTDMIVTQRGFQANAKTITTSDQLLQELVRLKN

SEQ ID NO: 158 - protein, 455 aa, Borrelia afzelii
LCLRRLKMNKLEEHYIVPKDVVAELDKYIIGQDEAKKLVSIALVNRYIRSRLPKEIKDEVMPKNIIMIGSTGIGKTEIARRLSKLIKAPFIKVEATKYTEVGYVGRDVESMVRDLMGIAVNMVKEEMYSTVREDALIKTEERIVESLFKGSGNSENIDPNEIKAEEKVKEKLRKKLRAGELDDTTIEIQISSKMPFSTIEIFTGGNFEEIDMGIGGLLGNIFDRKKKRELKIKKAKEIILAEELEKLVDHENISDIAKSKVENMGIIFIDEIDKIAAKNRSGNDVSREGVQRDILPIIEGSKVNTKYGIVDTSHILFIAAGAFNLAKPSDLIPELQGRFPIKVELKSLSIDDLKKILKQTKNSLIKQYVAMFKVYNLDLKFSEEAIDRIAELTFNMNLENENLGARRLHGVMERVLADLFFEVPGSKLKKFEINLDYVNKKIQINEQKDLNYYII

SEQ ID NO: 159 - protein, 227 aa, Borrelia afzelii
MKKTIIIALLYGLITNIYPTITSTLKPDEQTNEYTIEKLYQKAMMLKKSKKYNKAIANLKKIINMDQNQVDAHLLLSELEYLNKNWKKAIIKSQDYLKIIDFKDKKNFLDISWAYFLIGEVENSMDYIIKFFQSGKELFKENIFIAIDALFKKSIYHFINNEDVAFNIILTSTFQLALNDDTLFIIFLNNLEIIKQIPFYYFNRKKIKELYLQINTLKTIQNTSCRT

SEQ ID NO: 160 - protein, 379 aa, Borrelia afzelii
MNIKNKLILMLRIVVTISLIACKTPPEARESKNAKIAQPNNEIFQLRDLKDIKNELIRERGHLFYSKEFNEAERLEEAMKQNFSKKKAKEGNEIALKVLERYKTIIKETKEKKEKTNYLKENIEKYLNDAEANEAYIWIPLEIDEVNNLYFEATRKYKNYDLDNALDMYSKAFNRAQQAAKNAKEAKALKETDERMYKQLKALEAASNLPVYSNNKLIKPSPWNGRAFIKERNGHLNLLNINAEDTYFLGETKTSTPIVLAYEEKMEIAKTSNPQEQFKTLELIEQSRKLWEKGVEAKNVKNFRLANELFLESARYLEAYQSNASSELYVIKIGNTLWGISKKLYNDPYLWPKIWFANRQKIQNPDLIHSNWKIIIPAK

SEQ ID NO: 161 - protein, 527 aa, Borrelia afzelii
MKLQKLLFLIIFFLTFLCCNKEEKKEGVSFKISLGAEPSSLDPQLAEDNVGSKMIDTMFKGLITGDPNTGGNKPGLAKSWDISPDGTVYTFTLREKIIWSDGVAITAEGIRKSYLRILNKETGSNYSEMVKSTIKNGQKYFDGQVSDSELGIRAIDEKTLEITLESPKPYFIDMLVHQSFIPIPIHIAEKYGQSWTNPENIVTSGPFKLKERIPNEKYVVEKNDKYYNSNQVEVQEITFYTTNDNSTAYKMYENGELDAIFGAIPPDLIKDLKLRSDYYSSAVNALYFYAFNTHIKPLDNVKVRKALTLAIDRETLTYKVLDDGTTPTRRITPNFSSYSYAKNLELFNPEIAKTLLAEAGYPNGNGFPILKLKYNTSEAHKKICEFIQNQWKKILNIDVELENEEWTTYLNTKSNGNYEIARAGWIGDYADPLTFLSIFTQGYTQFSSHNYSSPEYNELIKKSDLELDPIKRQDILRKAEEIIIEKDFPIAPIYIYGNSYLFRNDKWTGWNTNITERFDLSQLKLKK

SEQ ID NO: 162 - protein, 541 aa, Borrelia afzelii
MNFNKTTKINTKLKLATLIILAISLITCNNNSEKEKLTFKVYIGGAPSSLDPHLVDETIGARILEQVFSGLLSLNTKTGKLMPGLAKNWEASKDKKTYQFYLRDNLVWSDGVSITAEGIRKSFLRILNKTTESAHVDMLKSIIKNGQEYFDGKVSDSELGIKAIDSKTLEITLTSPKPYFLELLLHHAFMPVPIHVIEKYKGNWTNPENMVTSGPFKLKKRLPNEKIIFEKNEHYYNAKEVELEELVYITSDNDLTVYNMYKNNEIDAIFNSIPPDIVNEIKLQNDYYQHKSNAIYLYSFNTKIKPLDDARVREALTLAIDRETLTYKVLNDGTVPTREITPDLENYNYGKKLALFDPEKSKKLLTQAGYPNGKGFPMLTLKYNTNETHKKIAAFIQNQWKKILNINIMLTNENWPVLTNSRNTGNFEIIRIGRIGEYLDPHTYFTIFTSENSQLASYRYSNLEFDKLIRESDFEKDPIKRKKILRKAESIIIEKDFPAAPIYIYSGHYLFRNDKWTGWSPNVSEVYYFSELKSIKNAKHN

SEQ ID NO: 163 - protein, 399 aa, Borrelia afzelii
MEGNDFIKFGSYLRKVRNDKNLTLEMVADDIKISVKYLKALEDSNIEIFPNEVLAVGFLRTYSEYLDIDSRLISTLFKDYKNRLNSSYIGIRSEDKISNLGFSSDKKVPDKKIFFFSLESLSMLKILLGIAGVILLLFMFIAFREVKVYFKKFFKLSRDEKKISNIHEVSFDKKNFWNLSLSEGDFLSLTYGNNIAKYRTSFISDDLVIVDESKKNKNIFNLGEFKEINLDDNLRVKIIYENYYYDKSKIAHVSLESFALNVKYVSETNIDNRFNILNWQFDVKGTEKLPSSDYLTLYSSQKLSNVDLKIDFLNDTFFRYADENNLHGKSFFASKGIPINLAFEKSLILFFSRLSDVNIILNDRNITSFLKEQGKEIFAVQFFWVKTPSGFDLKVSEVY

SEQ ID NO: 164 - protein, 472 aa, Borrelia afzelii
MSLNYVEINTLIKEIPFTNSLIKKIIQPDYKSLILEIYNKIENKKLKILISLNPSTTRFHITKKNFKKNTLKLRFSEFLKSKIQNGKIIKAFQMKNERIISLEILKKDIIILFIKLWPSSPNIIATNQNFKILDAYYRRPKIKETTGEIFLKAKEIHESNKMSDKKIMGLKEEYNNASHTSYSEFLENYYESLSNQIKETNIKELLIEKYKKELIVLEKRIESLKQQIKLIENIENEREKGELILLNINKIQKGLKEIDLLNYKEEKIKISLNQSLSPKENALQYFKAYKKGKSSFNTIQNQLKDNLDKFNLIQSKITMLKVENFITKEEYNQEETAIKKKEKTSKIGLHFTSYGFEIIIGRNAKENDELLRHCVKGNDYWLHTRDYPGAYVFIKSQKNKTPCLDVLLAAGNLCVFYTKLAKKSGKADLYYTQVKNLRRVKNGKLGLVIPKAEKNLHIKLDENLIKKIKNKT

SEQ ID NO: 165 - protein, 599 aa, Borrelia afzelii
MKREIYAFLSNFIVFLCFFLSLIFSYSYFFGENFLEKHRLIAAFFDSILVFYKYFYGFFIFIVCIYFAFFVQQEIKIYLKSYNGYLFSRLYTFLLVFFIIGLFFTFIFNLILPYIIAQRNEYKFSYDRYNLLESEANKISLKIKNIDISLSSNRFFLSSDLSDSMKQKRKHLENLIRIYDKMRIIYVNNEELLTNYYLVKSEYSKIPSYDVDLEKVKKTFSRYPLQSLKKQDFFNIVNEFISQADYYTANYFAYIAYVATKDDSFVSLLNLTLKFINENRNFEKEKMQLISEEKQKNFLYLNTEKFKLAYYGFSKLHKLLPSDNEILNYKNKSLEKLRKRYLFFDEIEKYFEYFGINDVLLLQPDSKRGFYDYIYMQKVVTLNNYSKIIKNFELIRFNNTGNVILHIKIPFATLRGNFVYQNVLDKDNEQSEITLTKVFVSKDSFDTNVLEVVKINENVENLALFSNFTEVGFFLKIQSLSSAFHKVTILNLKLINIFSLTLVLLISPILLVLMGAFFVSLFSKIEFNFNSKVMIVLVSLMIAVFSGIACLFVNYFLIIFTSLLIYVFNSVYISLAILSVLLGFLIFKIIILNYKERHI

SEQ ID NO: 166 - protein, 476 aa, Borrelia afzelii
MKNKFLIGVYFLLTLGISSLVIVESIFAFDESNNNKLSRSSYEQMMIQAFEFVKENYVDPVSDEVIFEGALKGIFQALNDPYSQYLTKKDLEEISKTTVGDYVGIGISIIKKMHSQDKQDKAKDLDPNSACVSIVTPFEGGPAYKAGIKSGDCITAVDGKSVSSMEVDQVVDLLKGKEGTKVKVSILRGKNLTLDFELTREKIEIQTIKYDVINPDIGYVRIVSFNPHTSADFSKALDNLKNRNIKSLILDLRLNTGGYFQAAIKMADDILSKGTIVSTKSRNSSKPVDYKASSKQVLPSDIKIVALIDKSSASASEVFVGALKDNKRAYIIGEKSYGKGLIQHVVPFYTGGFKITSSKYYTPSGKSIHKIGIEPDLEIKSPDFSEEEALIYKEIFDKKLVEGFLKGKKSITEQEIDFFVENLVKENPKYKIDKEFLGKYVFFNYYQDNNKELPIYNLHYDKALKAACEYLSKLGN

SEQ ID NO: 167 - protein, 458 aa, Borrelia afzelii
MKKQNPWISLSEEEKNQIFNFSENYKKFISKFKTEREVASYALDKAKKKGFLNAEEKKNLMPGDKIFYTCREKTVAFAIIGKNPIENGMNLIVSHTDSPRLDAKPSPISEENELVFLKTNYYGGIKKYQWLSTPLSIRGVIFLKNGEKVEINIGDNENDPVFIIPDILPHLDRKIQRNKKSDEIIEGENLKILIGSLPIETKEKNKVKLATLQLIKEKYKIEEEDFVSSEIEIVPAGTAKDVGFDKALIGAYGQDDKICVYTSLESIFDLEEIPNKTAICFLVDKEEIGSTGSTGLDSRYLEYFVSDMIFKIKKSEYNNLHVQKALWNSKSISADVCAAINPLFSSVHDEQNAPKLGYGIPIMKYTGHGGKSMASDADAELVSYIRQLLNKNNIAWQVATLGKVEEGGGGTVAKFLAGYGIRTIDMGPAVISMHSPMEITSKFDLYNAYLAYKAFYKE

SEQ ID NO: 168 - protein, 351 aa, Borrelia afzelii
LNGGNGEAFYMRIAIFIFGILLTSCFSKNGIESGSSKIKISMLVDGVLDDKSFNSSANEALLRLKKDFPENIEKVFSSAVSGVYSSYVSDLDNLKMNGSGLIWLVGYMLADVSLSVSLENPEINYGIIDPIYGDDVQIPKNLIGVVFRIEQGAFLAGYIAAKKSVSSKIGFIGGVKGDIVDAFRYGYEAGAKYANKGIEIVSEYSNSFSDIDIARVMANKMYSKGIDIIHFAAGLAGVGVIEAAKELGDGYYVIGADQDQSHLAPKNFITSVIKNVGDALYLITSESLKNDNVWEGGKIVQMGLRDGVVGLSNANEFEYIKDLERQIINKEIIVPCNQEGYEIFIKPILKL

SEQ ID NO: 169 - protein, 1377 aa, Borrelia afzelii
MKEIKDFEKIKIKIASPDQIRNWSYGEVKKSETINYRTLRPEKDGLFCERIFGTTKEWECYCGKFKSVRYKGIICDRCNVEVTHFKVRRERMGHIELAAPVAHIWYYKYIPSRIGLLLDITASSLNSILYYEKYVVIEPGDTDLKKMQLLNEDEYIEARERYGMSFNASMGAEAIKSLLENLDLDELSSKLRIQMIDKDDKTDKKLLRRLEIIENFKISGNKPEWMIMEVLPVIPPEIRPMVQLDGGRFATSDLNDLYRRVINRNNRLRKLLLLNAPEIIVRNEKRMLQESVDSLFDNSHKRKVVKGSSSRPLKSLSDALKGKQGRFRQNLLGKRVDYSGRSVIVVGPELKLHQCGLPAKMALELFKPFVIRRLIESEAVFNIKRAKNLIEQEVDEVWQILDLVIKEHPILLNRAPTLHRLGIQAFEPVLVEGKAIKLHPLVCHAYNADFDGDQMAVHVPLTPSAQAESWALMLSTNNLLNPANGHPIVFPSQDIVLGLYYLTMEKKNTVGEGKKFLNFNNVILAINNRSLDYNASIYVKIDGKYKKTTAGRVIFNEALPNGIEFVNKTLSDLELQILISKVYVVHGSSTVIEMLDIIKELGFKYATKFGCTISMSDIIVPDEKKAYIDRANKEIAKIQNDYAKGVITGEERYNNVVSVWLNTNEELTNKMMEILKKDRDGFNVIYMMADSGARGSRNQIRQLAGMRGLMAKTSGDIIELPIISNFKEGLSVIEFFISTNGARKGLADTALKTADAGYLTRRLVDIAQDVVVRIEDCGTINGIKVETVKNGEEILESLKEKAVGSYSIERIKNPITGEIVLDANEEISEAKIELLEKIGIEKLVIRSVLTCEAEHGVCQKCYGRDFSKNKPVNIGEAVGIIAAQSIGQPGTQLTMRTFHIGGVAQAGSEDDKISLKNTFILNGIEGFNVRVENGILFTRKGTLKIINVFYEEKIKNIKEIKVSDSQRVIKGIPLFVNNKGVEILSSYIGYVKLRDDKFLIVSEEQEVFLKAGTKLEIEVGEYVESGKVIGTFDPFAEPIIAEVKGKIKFKDIILGTTLKEEINTETGNVEKRITDNVFESLDPRIFIIDSGGVEIASYVLPGDAYLQVEDGQNINIGDIIAKLSKGSEKTQDITGGLPRVNDLFETRIPKNLTEMAKVSGIVQFKSIQKGKRLINILDEYGVEHKHYIPAGKHLLVRDGDIVKAGDMLCDGRINPHDVLEILGGISLQEFLLAEIQDVYRKQGVSINDKHIGVIIKQMMKKVKIVAVGDTNFVYGQKVDKHTFYEQNRKVIEQGGEPAIASPILIGVTKTSLNIDSFISAASFQETTKVLTDASIAGKIDDLRGLKENVVIGHLIPTGTGMGLYKKIKVSENVNSEV

SEQ ID NO: 170 - protein, 1155 aa, Borrelia afzelii
MIKRVHLGQGRADEILDLPNLIEIQLNSYEKFLQLDKLKNKKPLLNEGLESVFRNIFPIKSGNGDVALEYERYYIENDTLNFTEKECKRKGQSYEAVLKVRLNLQFLTTGEIRQKDVYMGTIPLMTERGTFIINGAERVIVSQIHRSPGVVFYKEKDLYSARIIPYRGSWLEFEIDSKKDYLYVKIDRKKRILITLFLRALGLDTREKIIETFYNIKKIKVEEGTKRDLPGQYLAKSINIRENMYYRAGDKITLQDVEDFLQNGVNEIELVDFDGYNDVSGKYFVSSNVILNCLEKEDAFFALKDGSKELPKESVMLAVYGALFPGEPISIDNAENDLKTIFFSERRYDLGRVGRYKLSKKFGSDDLSTSVLTMDDIVNTISHLLRIYEGHDILDDIDHLGNRRVRSVGELLTNIYKGAMSRVEKIAKDRMSNKEVFNLKPQELISVKPIVSAVKEFFATSQLSQFMDQVNPLAELTHKRRLNALGPGGLSRDRAGFEVRDVHYTHYGRMCPIETPEGPNIGLIVSLATYSRVNDYGFLETPYRKVVNGEVTNELEYLSAIDEEKKCIAQANAVFNSDGKYLEDLVSVRISGDYTTTNPKNIDYMDVSPRQLISVSSALIPFLEHNDANRALMGSNMQRQAVPLLFPKPPIVGTGMESVVAKDSGVVVKAKRSGEVILATSNKIVVKPFESENAKDLDEYHIVKYERTNQDTCFNQSVLVKEGQKVERGEIIADGPATRYGELALGNNLLLGVIPWNGFNYEDAILISDRIVKEDLYTSIHIKEFSIEVRETKLGPEKVTGDIPNVSEKILNKLDENGIIRIGTYVKPGDILVGKVTPKSEGDITPEFRLLTSIFGEKAKDVKNNSLKVPHGTEGTVIDVQRITKEDVGNLSPGVEEILKVYVAKKRKLKEGDKMAGRHGNKGVVAKILPVEDMPYLADGTPLDICLNPLGVPSRMNIGQLMESQLGLAGKYLSESYNVPVFESATNEQIQEKLKKAGFNPTSKEILYDGYTGEPFENEVMVGVIYMLKLHHLVDDKMHARSTGPYSLVSQQPLGGKAQFGGQRLGEMEVWALEAYGAAHTLQELLTVKSDDMSGRVKIYENIVKGVPTNVSGIPESFNVLMQELRGLGLDLSIYDDNGNQVPLTEKEEELINKS

SEQ ID NO: 171 - protein, 349 aa, Borrelia afzelii
MEKVFKIKMLKKICFCLLFLQAQMVLSQDQQDLDFNDQYFYFNFQSAYYPPHEMGTNGKSFSQSFKHPNFQNIEPSLKIPANYWGGIKLISYLGYYKNFKALHNPNSIFFKNNGIDVDLNIGLSPVSISFKSMLSFTPIAFLNLYVSNEIGMGWEAFGFKGIGVHIENGKYSNTPEFYSEITIGGRFQFDLNAIFQGDWTHIITVIGNDFTYLINLHANKNQLWKYKADDGKNINGMLIKPYALLAYKMPIPLNTIGLLYEGKTQIGKERNISSWKNKGWGSDIFYHNISIVANFEIAKPLTIGLKLKLSTNPTYTSNTAGLADISKRIATGNSYFYYDSIGISVTHKY

SEQ ID NO: 172 - protein, 1493 aa, Borrelia afzelii
MKKANFLSTNFLILLLVCFVNGNLFSKDIFKFKLVDQYFPFYYKNNKGEYVGLIFSILDKWAKDNNVDIIVEPIGNLNESKIEDEAIYLGLTYNSKLNDLFYFKSELARSISILFSKSSNIKYKNTHSTFLSNFNIGVVKSTIYEDILRLRGANAIFLADNVQELLLALKNDKVDYIYGDCKTLHYIAQRFLGEDLAIFSGDFFYSIKNRVAISRNAPEIIKNLNLDLFSYLMKMPDEYVVSFLDRTSKGNFIDVGLYNDYPPLSFINSKGELSGILVDLWNLLSRQHIFKPIFKGFPKEDIKKTLDGKSVGIFGGIISNDSVFENVNYVVSKPIYPLNFKFYSKGLNNNVGPINSQFIDFNFNNIQLNKNQDIVNNFIDIVNNSYGFIENSITAKYLLKLNGYNGRLKSYDSIFNKNRFLVLAIDNRVYKVIKYILNAIFDDISIESLLQIDKNWLDKEEINSSRINSYKIMNKVKFNIEEKIWLLENNKLNLAVKNWYPIDYVEANNYKGINQFLLDKIRMFSGLEFNIIETSSSLDLKKLIKSGKIDMLNTNTIDSNLDNVFNIKLNSRIPLYIFSNKKRVLPSRSLERFAILDFLYSKNLASNIKSKLVLVNSFKEALLLLYKGNIDGIISDEYTAAAVFEELNVVDVEKLPIFRDLAFDLSLAIYDQDYILKEIIQKVVMRSNVDGQRYLNDWKFDVYYKSKGIRFKNFKFLVLTVIIFYFTFLGFVIIFMFKLSFEQKRRYSFVMNEKKIAEAANAAKTIFIANVSHDIRTPINGIIAATELLDTTILTDVQKDYVRMINYSSDSLLSLIDDILYLSQINVNELHVESQQIDLEREMEMVLKTFQSQCAKKNIDLFSYSKSVFNNYIKGDIVKIKQVLINLIGNAFKFTDDGVIVLNYEEVYRTRVNGNRLVTVEFKVIDTGKGIKRENLSKIFEIFKQEDDSSSRVHEGVGLGLSISRELIRLMGGLGIAVDSKVGEGTTFSFMLPFFLGSELKSKNLSINRFQSINSNSKVLNVLLSKKSIKIFEHCSTLLGHSSNVHYVASFEDAYKFFKKYSFYNFVCVNVNNDNIEESIRFANNIERLSSDVQIIFLFYCLDNKALKNLKYVYVKKPLTGLGISSILSKKEFETEVDFENLAPIDSAFKVKEPISVLIAEDNQVNQKVLKDILIVIGINENFIDIVDDGVKALKALKEKKYAISFIDIRMPRYDGFSVAKEIRKFEKAKNLKPCVLVAVTAHALQEYKDDCFKSGMNDYISKPIHISSIKGILKKYLQFEVDDIGKNEDLSQLVKFPNLDVNRALKELNLSYTSYSELCRGLVDFISINIIDLEKAFDEENLSLIRDISHSISGALSNMRSALYKDFKKIETSKDSIYELKKMYSFIKDDLLRLISNIKENVLFESEIVSENKLYFKNNDQFLNLLNKLLIGIKTRKPREYKGILKSIDKYVLDDNIQVLFSDLRKNLRLYRFDESSKILKEIIEKFSNKRY

SEQ ID NO: 173 - protein, 260 aa, Borrelia afzelii
MDGVFKMIDIQLLDIDNDQPRKSVSLVELEELSISIKENGILQPIIVCKVNERYKIIVGERRFRAAKLIQMTNIPVIEVNIKESCRDFMPLVENIQRENFTPVEEAYAYKNVMNKYSLTQKDLSEKIGKSRTYISNIVRILDLEQEILNAVHRKEISFGHAKVILSLKDKQDRYNLYLIILKKKFSVRDAEKYVKNFYKSITKKKEVEQDPFLSNIKEFLFDKIQTKIDIKGNQDKGKIEIEYFTAGDLRRIVSFFGHIN

SEQ ID NO: 174 - protein, 639 aa, Borrelia afzelii
MNGRFMNYVASNIQVLKGLEAVRKRPGMYIGSVSVNGLHHLVYEVIDNSIDEALAGFCDRIDVIINLDNTITVIDNGRGIPTDIHEEEGISALELVLTKLHSGGKFNKGTYKVSGGLHGVGISVVNALSSFLEVYINRDGKIFRQTFSKGIPTSKVEVVGESSITGTKVTFLADSEIFETLDYNFDVLEKRLKELAFLNDKICISIEDKRFGKEKSSKFYFEGGIKSFVDYLTNDSKAYQSESYYIDGLINDVIVNVGLKWTESYSDNILSFVNNINTREGGTHVMGFRSGLTKAMNEAFKNSKISKKDVPNLTGDDFKEGLTAVISVKVPEPQFEGQTKSKLGNSEIKKIVEIIVYEHLLKIINLNPLEIDLILGKAIKAARAREAARKARESERKKNAFESLALPGKLADCTSKNPLEREIYIVEGDSAGGSAKMGRNRFFQAILPLWGKMLNVEKTREDKVITNDKLIPIIASLGAGVGKTFDITKLRYHKIIIMADADVDGSHIRTLLLAFFFRYMRELIENGYIYIAMPPLYKIKYDNRIYYFYDEKEKEKFLNSIETKNRNSILLQRYKGLGEMNPTQLWETTMDPARRKMRLMNIDDAVEAEKIFVTLMGDLVEPRKEFIEQNALNVINLDV

SEQ ID NO: 175 - protein, 586 aa, Borrelia afzelii
MFKVIKCNELNEKLINKKVEINAWVKKIRHHGKFTFLDIRDRYEKAQVLITEEHLLKIVEKIKLEYCIKIQGLLIKRPSNMINANMTTGYFEILAKNIEIISKCNELPFMIEDDNNASENSKLKYRYLDLRRDSLKNKIILRCQATHLIRNFLVKRKFLELETPTFVKSTPEGARDFVIPSRIHKGSFYALPQSPQLYKQLIMIAGFDKYFQIARCYRDEDSRGDRQPEFTQLDLEMSFVKKENIFKLIENMLFSIFKNCLNIKLPKKFKKITYKMAMNKYGSDKPDTRFELTLQDISRNLKNSEFNVFKDILNNKGSIKTLIVKDKADTFSRAKINNLEEIAKLYKTQGLYFTKIENNKFSGGIAKFLKTEEQQLIKAYSLENNDIIFFIANNKWEIACKAMGQIRIKIANDLGLIDENKFEFLWVYDFPLFEYDENTKTYIPAHHMFSIPKKRYISNLEKNPNKAIGEIYDLVLNGVELGSGSIRIHNKELQQRIFNIIGFQKEKSEDRFGFFLKALEYGAPNHGGIAIGIDRLIMLMTKSTSIKDVILFPKNSFAASPLDNSPSKISNEQLKELGINIAADDT

SEQ ID NO: 176 - protein, 229 aa, Borrelia afzelii
VKTIDHELYYEFRIADDVKMIYTKKPFHLNLKELSNDNLNFVPKSKKIKYLKQLHTDIIYEVKDDFINFQEGDGLISSSLDVALVTYFADCLPIYFYDSVKKIIGLIHSGYKGSFSLIILKMLFMFEKMGSSFKDLKIVFGPYNRSCCYEVSEIFLKEVSNKFSKSLLNTAFSIRDNKIYFDNASFNFNLLSSFNLNIYSSKLCTYCSKNLYSYRRLREGQSYALIWRI

SEQ ID NO: 177 - protein, 427 aa, Borrelia afzelii
MHSYIVEGGFKIGGQITASGNKNSALPCILAALLTDEDVILENIPNINDVKVVLDILSDIGADIVREGNTLKIKVLDIVKTEIDSSFTDLIRASILLLGPFVSRFGKIDMALPGGDVIGKRRLDTHFYGLCKLGAKLSIKDERIVLKANKLVGAEMFLDEASVTATENIIMAAVLAEGNTVIMNAACEPHVQDLCNMLNSMGANILGIGSNVLEIKGVKKLSGTIFRIGADFMQVGSLISLAALTGGELEIKKADPQHFRLIRHIYSKLGINFEYDRENVYVRDKQELKVKLDFGGQIPKIDDGPWPAFPTDLMSIIIVTATQVEGTVLVFEKMFESRMFFVDKLIKMGARIVLCDPHRVVVTGKAPLKGSVLSSPDVRAGMALLIAAFVAEGRSEIQNVYQIERGYEDVASKLINLGAKIKRVKSQ

SEQ ID NO: 178 - protein, 209 aa, Borrelia afzelii
MERKVFSKDGKEIRTINLDDRVFNIEISHGSIYNAIKNELSNLRVGTSSTKTRSEVRGSSKKPWKQKGTGRARVGTKRNPVWIGGGIALGPKPRDYSYRLPKKVKRLAFKSVLSLRASDENNFKVIENFNIESGKTKDLALIIKNFASFNGKVVILLGNDDQMIKRAGKNIRDLKILSFDKLRVVDLFYAKNLIALESAVNKLNEFYVK

SEQ ID NO: 179 - protein, 2162 aa, Borrelia afzelii
MIDFATILVNLFLVSIVLFVYRQYDKRSRALDKIKKFIDLTKVNLEDFIEDKTKEINDLAVDMEAYQRSSIEIIKKIEEVQQKIKNKSNDFAEVEKKIAYHDSMLKDLDEMTFKVQENIERLQVDGKIVDKLSKTLKGFNTQIDSVESNLNSVLEKFDKTNKENLESIKIASWEKFDTNIKDLVFKMDNLNKEIDLYEKDLANIEERKKDILVKGNEKLDLEFNDFLEKVEFNIVKYNKEIENSFGFYEDKYKLIENSIELIMESVKNKINEKEDFILNRLNEELQNKFKDIFTYVDDRSKEIQDKLEDKLILVDDEISSMSSSFKDNVYSRINSLEESIRIEMGKYEEQVDDVFDKFRSQVELNLKNIYEDYEDKINQVDKNIKERVELSLLDLNSKMESVQVGAIDLMKRLEDDSNKIYLEFKNKFEEDIKVFSGSFKDDINQLKMQLESQLLDVDSNIQDKLIKLNDNLISNFEEIGGKFNNNYSNLSDSINAKYTALFESLDSSSSKFEDQMESKYKVFTDKLTAEMDDFSLIYGKKFDTFSQEAINNYQEFQDLNKKLENEIGSLCNMLEENQEILKRDFNTSLINIKDEIGKNIIEFKDRYYDEVNIFVSQLEESKLQYSKWQSEMDSNLKNIESQINKTNEEFLSLIQIQKDKGIELSESVFNDLSDHIQKKAIDMHGSWKDELIALNKSLLDIKISSEELLSSATLKIENLEKDINDRMEYVLLKTGDIESLVIEKYKELKDMSYSQSDEAILEIKEFINRQTEIIKDKSVFMLEDLNKKFDDKNNFVISKIEECDYKLKDFKIESEDVLNNFKSDLNEFIESKLQIVSDIKSDNQKQIDDFLDRISKDILNRKDSINNEVDIKLSDWQSKLNEITVKIENLLSSGKVDLDLIDSEVTTKIKELKFSIESLESYYLEKIDEFRNQGAIYSDELLQDIMNHFNKETRELEENLSKKFAVVLNNSEEFVKEVDSLLQDKRTDIASFQANIDITLDSLSVKFNDINKEINEKYNEVISNYRGYSENISSKLENEIMHEIENLNRRLTDRMDSLSKGMDENLQKLKESFDVSKYQVEKFELKVKDLTDDGETKISEFVKEIEQYYKSRLEEAIDYRRTIDSDIMQAKERFGEITNDLKNNIESKSEFLNDLYKERFKLIESNFEERYSTFLIESEGAISKIRDEIYKTLTINDENLQIKIAEMDHNFEIIEQRSKDILEFEKELRDKIQDCYGVINSQFGEIKVSVEEDIKNHFEVCIKKANTLIDDDIIKYENEIHKRIDSLKSIENTFDSIEKNLNDKVNGCIDKIANDFNLKYIELEERCNEGQLNLESKIDNKIKAIDNLASSQYDGLEKKYADMYDEFLERLNSYITTLSEEFKHSNKEMIFELESQLKNLKNLESDLNNVEKDVIRLKEESYHNVSSHLKLLEEDFFKDLKIRGEELKYSLENFVASYNDKIQNLEYDLSKNLENKTELIQSFHLDIEQKMKNDKENFYLDFTKEFSSKKKDMESEIALMETNITGRVDEFIDFVNNRQNIIDSWFLNIKDDVKNWQEKSYSTIEKKINLAELGIKSFENDILNVKIGLESFKDGFEVKAEEIFSNLQSEAKKIEQSVHLDFKNIGESLNLKVLDLERFVDFKVEKIDEKVNKKTEDILTQAEVKFLTQQKNLEDRIFELNQKLEQEFTTLSSNLDKVRREMVDVISSDKESFEGQIELMHKNISEFSEKISLYRSNIETSIENEYSSFSKSIKSEFGLLEDELKKSLKHSTLEIESVKNDLQEQIDKFEVEFKKNHKELLKEVDTNVLELESKILNCDITFNKFISDIKDNLVEYKSDLRKEFEDSYDKLNFQIENFKKLDAELEKNNSIFLEAYSLKDKLEKLWETLKNEIDLAQEYKNNFENVNKEFYNIQKETLGIIETFNDLKLEHESIQAIKNDLNKFFEFYSSFDSRYKSLVESYDEMQIYKAKIKEISVEQRTILDNYERISNKESILKSTIESVDKNFDLINEVEKRFNTLSKESTKFQNNLKDMENVVSNLLLNKGLSEEVLVNAQNLKEMLLDIENRLKNTLTMREKVVKSETRLENLNIAAEERIKTLGILVKTDSKYQDNVGLNNETVRNSVIKLMRQGWSAEEISRATKLSIGEVELILELGISNKGD

SEQ ID NO: 180 - protein, 635 aa, Borrelia afzelii
MGKIIGIDLGTTNSCVAIMEHGKPVVIQNSEGGRTTPSIVAYTNKGERLVGQVAKNQMVTNPENTIYSIKRFMGRRFEEVASEIKMVPYKIEKGLNGDARVNISNIKKQMSPPEISAATLTKMKETAEAYLGEKVTEAVITVPAYFNDAQRQATKDAGKIAGLEVKRIVNEPTAAALAYGIEKKHEEIVAVYDLGGGTFDISILELGDGVFEVKSTNGDTHLGGDNFDDEIIKHLISEFKKESAIDLSNDKMALQRLKEAAEKAKIELSGAQEASINLPFITADANGPKHLQYTLTRAKFEQMVDHLVQKTKEPCLKAIKDAGLKASDINEVILVGGSTRIPAIQKIVKDIFGQDPNKGVNPDEAVAIGAAIQGGILTGETKDMVLLDVTPLSLGIETLGGVMTKLIERNTTIPTKKSQVFSTAADNQTSVDIKVLQGEREMAAQNRILGNFILDGIPAAPRGVPQIEVSFDIDANGIVHVSAKDMGTGKEQKIRIESSSGLSESEIDRMVKDAEAHAEEDKKLKENIEAKNTANSLIYQTEKSLKEYSEKISIEDKETIENKIKELKESLEKEDISLIKSKTEELQKASYKIAEMMYKDSSQQNASNQQENGTQNNTSEEGKEADYEVVDEDKK

SEQ ID NO: 181 - protein, 187 aa, Borrelia afzelii
MEKKETKNETEKTNKQDNKNTKSQKKENLNLVNSDKKITELENEISNLKDLYLRKQAEFENFRKRLEKEKDNFVKFANETIMKDVVNFLDNLERAINSSKKSKDFDNLLTGISMIENEILSIFDKKYNLKKFGENGENFDPSRHEAISIEEKEDLKNPEIVEVYQKGYCYNDRILRTAKVKVAQSKN

SEQ ID NO: 182 - protein, 248 aa, Borrelia afzelii
MKDLNENNDNNKGFFVALTSIATVCIIIFLGTIIFFPNKNLTSDIAEKNIVLEETKDQNTLENVDQNEKSLKVSETPNEIIIDLTQDLNKEKKTTPQKIPNTSQKSKIIEKSQPTPQKIPNTSQKSKIIEKSQPTPQKIPNTSQKSKIIEKSQPVAQKDLNIDNIYDPNTEYYIQFVSLSDPINADNYIQKLLKYNIVAKIYSATVDNKDIYRVRSGPYKTKSEAKADFKKIAGISEFKETYILPVNK

SEQ ID NO: 183 - protein, 501 aa, Borrelia afzelii
MNKIKNRIFMYFIILLCISLFGAANNTINYSSIEIPLEDLSEEFKDTENKNDQTNALKHLNKNIASYKDLKKGKDLKLPENIRDKKLFKKRMDENDLKSVIENYENKIKNIEKLLKTKNQKASANENKKIELIEKKAKKYEILTNKLKNEIVEIKKLLNKKSRPKDAENYEKINIENIDDDDDDGDDDDFEENYEYNDEIEETNEDNYPSNEGIINNLKEKLYENEKYYAINEKKFDELEDRINDNENIILDLQRELRNFKKKDDSNKNLEEIEENLSLIGKIINGLKEKISANEAINKENQKKIRTDKHKLKELEDKIKENEETILKLQKELNNFKKKEISQKSLNEEAFIPSIPNKNDDLEENVKLEKKYLKPAEKNESQDLEENVKSAPKTTMIKTADFQIYPDIYLNNYNFKEKGDQFAFKKENTYYIEIDPTNNLNGALKNHEIISKYKFEKYFINPTLKNKEEFFRNLIEVKNIHELGIMYKSLKPEFKQIKIIK

SEQ ID NO: 184 - protein, 650 aa, Borrelia afzelii
LILTSYFKQIALFIIFRLCYIIKKVKIKLKRKIYMKKQFDTEVNDLLYLIIHSLYSHKEIFLRELISNASDAIDKLKFLSLTNEKFKNIALEPKIEITFDDKSILIKDNGIGMNEQELTNHLGVIAKSGTKEFINNLKQDEKKSANLIGQFGVGFYSAFIVSEKVEVTSKKALESDAYIWSSDGKTGYEIEKAKKEDPGTEIKLYLNKEGLEYANKWKIQEIVKKYSNHINYPIYIKYNEPIMKDGKQEGIEEKEEKLNETTALWTKNKSEIKTEEYNEFYKNTTFDYENPLMYIHTKAEGNLEYTNLFYIPSKAPYDLYYPNTKPGVKLFINRIFITDSEGSLLPNYLRFIKGIIDCQDLPLNVSREILQQNKILSKIKSSSVKKILSELEKLSKKNPEKFSEFSKEFGRCIKEGVYSDFENREKLISLIRFKSSSVDGFVSFKEYKERMNESQKSIYYITGGKENILKENPIVTAYKEKGFEILIMDDELDEAILNLIPEYEGLKLKAINKNETSNELKDENFKKIEEEFKDTLTRVKEILKDQIKEVNLSATLIKEPSAIIVDSNDPTYQMQKIMLSMGQEVKEIKPILELNPNNKIVQNLKNLEPEKLEKISILLFEEALLTSGMPSKNPRKFINIINEFLEKDLL

SEQ ID NO: 185 - protein, 229 aa, Borrelia afzelii
MLEIISLGGGVINSNQINIEFIKNFKNFVFKWLLENEKRKIILIVGGGKVAREYQDAYKKINPNFKVSELDEIGIMSTKLNAEFLCKVMNPLCKDKIVTNPLKNFSFKGKILIASGWKSGFSTDYIAVKFAEKFNKKDIINITNVNQVYDKDPKKFKNATAFKKLNWEQLQNIVGQKWNPGLNLPFDPIATKLSSKLGLTLYIVNGNNIENLEKVFNKNNDFLGTVIVK

SEQ ID NO: 186 - protein, 1161 aa, Borrelia afzelii
LLKIKFYFDKIILGMSFRAKFIHLHVHSDYSLLDGAAKISDIISKAKKCNMSHIALTDHGNLFGAIKFYKEAKKAGIKPIIGIEAYMAKTSKFLKKHDDLGKMSYHLILLAKNELGYKNLLKLTSISYLEGFYYRPRIDKEDLEKYSEGLICTSACIGGLIPRLILANRFEDAKNEILWFKKVFGNDFYLELQRHGIKDQDIVNERLVEYSKELGVPLTVANDSHYVNREDASAQDIIVCIGTGAKKSDENRLKMETNEFYIKSQEEMCELFNDLPEALENTVRIAEKCDDFKITFPGPILPDYQIPIEFNTLGEYLEYLTLEGLKFRYKTLTSKIKDRAFYELSVIIRMGFEGYFLIVWDFIKFAHDHDIPVGAGRGSGAGSIVAYALRITDIDPLKYNLLFERFLNPERISMPDFDIDFCFEGRDEIIKYVTNKYGEDKVAQIITFGTLKAKAVVKDVARVLDIPFAESNELTKFIPDGPKVSLKEVLDDNSLKEYFTSKPVYKELMNAALVLEGMNRHASTHAAGIVISKTPLTDYVPLYKDYKQGSISTQYTMDLLEECGLVKMDFLGLKTLTLIKNAENLIRSVNPDFKIKNIPDNDVKTFKMLGEGRSASVFQFESEGMQQILKDAKPDNIEDLIALNALYRPGPMQFIPQFIAAKKGVKRIKYPHPDLKEVLRPTYGVIVYQEQVMEVAKIIGGFSLGKADILRRAMGKKKEDEMNEMKVDFLRGAIEKGYDKEIASEIFELLKPFSGYGFNKSHAAAYSLIAYQTAYLKANYPEYFMAANLTNEINNNDKLSYYIEESKAMGINVLKPDINRSFREFRVTDSGISYGLNGIKNLGGIVVDLIIDEREKNGKYSSFEDFIRRVDDKVINKKFLESAIKSGLFDSLNQNRKTLFENLDRLIEVVSEDKNNKRLGQNSLFDVLESQESIQQSFNYQVLKEYSYSELLGFEKELLGFYVSGHPLDPYKKAINNFSSLNVLKDLAAKKDSIVQFSGILNSVKIIQTKRNNSRMAFGVIEDFKGAIDIVVFTESYERYKNFLLEGNVIGVIGRLTFNRDKFSIVVEKVVNIERLSEDKVNNIHIKFLSNKLNDLQLLNSLKESISNFEDNSGFSNVYFYLRENGKDLKLKMNSILNFGPDEDKLDKLRRCVIVEDVWVD

SEQ ID NO: 187 - protein, 264 aa, Borrelia afzelii
VNNFLIKLLLFLLVFSNSYVAFSKNSNVLIITAMDSEVEQINKLMSNKEEIVLKEYGLNKKILKGKLSNRNVITIVCGVGKVNAGVWTSYILSKYNISHVINFGVAGGVVSDKYKDIKVGDVVVSSEVAYHDVDLTKFGHKVGQLMGLPQKFSANKNLVDKATKAVKSKAVSSNSYSGLILSGDQFIDPAYINKIIGNFKDVIAVEMEGAAVGHVSHMFNVPFIVIRSISDIVNKEGNELEYSKFLKLAAFNSAKVVQEILRIL

SEQ ID NO: 188 - protein, 619 aa, Borrelia afzelii
MKNHILYKLIIFLTTSAAIFAADALKEKDIFKINPWIPTFGFENTSEFRFDMDELVPGFENKSKITIKLKPFEANPELGKDDPFSAYIKVEDLALKAEGKKDAQFKIDVGDITAQINIYDFFIKISTMTDFDFNKESLFSFAPMTGFKSTYYGFPSNDRAVRGTILARGTSKNIGTIQLGYKLPQIDLTFAIGGTGTGNRNQENDKDTPYNKTYQGILYGIQATWKPIKNILDQNEDTQSVIAETPFELNFGLSGAYGNETFNNSSITYSLKDKSLIGNDLLSPTLSNSAILASFGAQYKLGLTKINNKNTYLILQMGTDFGIDPFASDFSVFGHISKAANLKKGISLDPSKKAEDIFDPNGNALNFNKNTELGIAFSTGASIGLAWNKNAGEKESWKVKGSDSYSTRLFGEQGKKSGVALGISYGQNLYRSKDTEKRLKTISENAFQSLNVEISSYEDNKKGLMNGLGWITSIGLYDILRQKSVENYPTSTLSANENNQAGQSSTGTQAITPNLTFEDAMKLGIALYLDYAIPIESISTEAYVVPYIGAYLLGPSNKISSDATKIYLKTGLSLEKLIRFTTISLGWDSNNIIELANKNANNAAIGSAFLQFKIAYSGS

SEQ ID NO: 189 - protein, 476 aa, Borrelia afzelii
MSIVIDSFREISKIPRCSKNVKGIINFIKERAKKFGYSFKEDSVGNIVVQIKSNNNIDMPPIILQSHVDMVCEKNESSLHNFETDPIKIVEEDGYLKGVGTTLGADNGIGVAMMLGIMSEADSFPHPDLELLFTVDEEIGLIGALGLDSKLCNGKSLINLDGEEEGYFLVGCAGSRLVEIVFSPQYNLATKKTKVEILLKGLKGGHSGADIHLDLANSLKLMFFALFEIKANIDFEIESIFGGESSNAIPNEAKALICINDSDYELLSKELKLFVFKVKSIYSLENEFDIIVNKKEFSSVKVLDENSKSRLLNMGMGFLHGVQRVENYENKLIKTSLNFSSLFKMQDEYIFTFLIRSLLDSDKEYVFNHLQSISDLSGASWRIIYDYPSWKSDKNSSLLKHLQGVYKEMYLEDANVSLIHAGLETGIISSKLGGIESVTLGPWIESPHTTRERVNISSAIRVYDFLKKSLERFQKF

SEQ ID NO: 190 - protein, 430 aa, Borrelia afzelii
MARVKGQKVKECSFCGLSVAELGGNVVISNGVAICPECSKICHNLFKEKLCKSLDSRSNGLPTPKQLKDHLDMHVVGQEDAKKVLSVAVYNHYKRILKNNKYDDGIEIEKSNILLVGPTGSGKTLLAKTLAAEMNVPFAIADATTLTEAGYVGEDVENILLKLIHAAHGDVSLAEKGIIYIDEIDKIAKKNENVSITRDVSGEGVQQALLKIIEGTIANVPPRGGRKHPYEDTIEINTQNILFICGGAFVGLENIVKNRINKSSIGFSAIEKKNIRDDASLKYLEMEDLIKFGLIPEFVGRLPVHSYLEKLSKEDLIKILVDPQNSIVKQYYHMFKMDNVELVFEKDALESIVDEAILKNTGARGLRSILEGLLKDVMFEVPSISKTKKVIVTKESVLNADINPLILVGNAIKKPWAKELYEINLKYDKK

SEQ ID NO: 191 - protein, 813 aa, Borrelia afzelii
MQLKNLGQKSYMKSILNMIKNRKEDLPIVILKENVLFPNVTLWVTFDNEYVINSIAQSMLEERLILFAYPNESNYDESGKEGVKNLCSVGTYSKLIQVIKVSKDVVKVLVECQSRVLIGSVSKKNDYLRAKVTFVSDAEGLNRELFTYAKFLKETYEVYRNSLSLKSYDSDNEPINYFENPSKLVDIMASNSNLENSVKLDLLQELNVKTRIEKLIVNLNIEIDLLDLKKDINSKVRAKLDKGQRDYFLSEQVKEIQKRLGKDENEYIDRLNSKDIPEDVKSKVEKEISRLSKMQMNSPDANIIRSYIELILDLPWNENTVMKNHLSEIEFILRNSHYGMDEAKEKIINFLAVYQINSKVKAPILCLVGPPGIGKTSLVESIARSLSREFVKISLGGLRDEAEIRGHRRTYVGSLPGVFISAMKRSGKSNPVILLDEIDKINNSYKGNPESALLEVLDPEQNYKFIDHYLEIPYDLSNVLFVTTANSLNGMSKPLLDRMEIIKVEGYSYIEKLEIAKIFLIPSIIKESFLDKVYIRIEDDVIFNLIRNYTMESGVRGLKRVLTNLIRKLVRELLYKYSKDQIIKGNFYSPSSLIHGNNSLFTHDPDIPGIYKIININNYYNYVDTEYNLDLIKIDSSGFVYGLAWTNYGGTVLPVEATKFEKKGDIILTGSLGTIMKESAQLAYSIVKTYSSRLNFDVKESPEIHLHFPEGATPKDGPSAGITIATAIASILSDKKVPLDLAMTGEVTLKGFVLPVGGIKEKVLAAYRNGINKVILPKDNKKDYFKLPEEVKDNIDVKFVSSLEEVFDYLNII

SEQ ID NO: 192 - protein, 698 aa, Borrelia afzelii
MTTLFKILALRKSKTFYVLQIIKLIILFYFLIISPANLNADFEYKVGKGDTLFSIAIKYKAKVNDLKRINKLNADNIRVGQILIIPSDSSLDPNITHKVNHSLNSLESIKKGVILYTVKEGDTIESVSKLVGLSQEEIIAWNNLRSKDLKVGMELVLTEPDFLKPYVVKKGDSLSKLSQDFDISSKDILKFNFLNDDKLKIGQQLFLKRATKNIDFHYVKKGETLGRIAYIYGVTAKDLVTLNGNRAVNLKAGSLLNVLKIVNDDLEKSVEEDLKIEKKTDNQFIYHSVAVGETLYSIARHYGVLIEDLKNWNNLSSNNIMYDQKLKIFDKKLLFDSSIAKSKNDLYIKNKVDSSSNSSNEVKTIVNLPSSKNKKLNLNTFRITTNQDFFDISSLVILDSKIPIFEVVGDFYYWYRPKKISQPSEFYSEDWHSPLNSYKKATQLFKSFEKLVNSRFNKGSRLKDKLIILDPGHGGLDPGAIVKSRDGLGNEVFVVEDEYVYDIALRLYVYLKEEGANVELTILAPDHLIRNSVFANNTFVNVKNEVYNDYDLNKNDTVDSWINGTPSGLKKRLVVVKNIVNKYKHIKDKDIAFFSLHADNSVGAPKSMGFYYQKDDEKKYDIHSKSVAEKITEGMKRSFYIKGQNLHVLRNNVVMTKLLIEVRNLAFPEEAWSIRSSKLRDQDSKILANGILKILENN

SEQ ID NO: 193 - protein, 562 aa, Borrelia afzelii
MFRKLKKSKTYIIIISITKFSENNLLSIISNIKYLIEHKQLAYKIHWTFPIYFFEILREHEELNKWLFERFKTNTDIYMPGTYSGSPHEYMLHDEIHLDLYWALKNPFKSGYKDIFQNTPIMLYIYNIEKFRKKVTELYRKLNFNYTEGIRQSKNNKTYLIFYKNNCQYLYEVQKIDSPRSNVETLIYFYEIKETYDNQELKNFLLYLKSLENSLHSIKIQNLAGSKLTTELLEIPKFNSLKEQEPIINFQNKRLKDYQINEKSLREFLINKHQEEIVRNSESIIPKNLEYNMEGNFTLSHDQYNIKFENGKLNKIKFKDKKVEFLNTSRTYFKILSKKELIKEASIESSFSFSNEKILGIKQYLAFNSTTKSTIDFFIDETISSFFVSIKIKWPSKINLDKKALKKYNPDYLLEYSALEIPVFEITKGTNLKITAKYSDLDTYEKIIITKNNPKGYINGTEFLISKGNDKNSNFFISFLNVEKQIIHTINYKIEKINSKKWLILNIGGSYNKVKIQDVINYSQTLNLMILPLNNNFDNKIRLNSKIKNLIFYTNIKKYENK

SEQ ID NO: 194 - protein, 545 aa, Borrelia afzelii
MAKDIYFNEDARKSLLSGVEKLSNAVKVTLGPKGRNVLIDKKFGSPTVTKDGVSVAREIELENPFENMGAQLLKEVAIKTNDVAGDGTTTATVLAYAIAREGLKNVSSGINPIGIKKGIDHAVSLAAEKIRQSAKKITTKEEIAQVASISANNDSYIGEKIAEAMDKVGKDGVITVEESKTFDTTISYVEGMQFDRGYLSPYFSTNKENMSVSFDDAFILIYEKKISSIKELLPVLEKVLGTNKPLLIIAEDIEGDALAALVLNSVRGALKVCAIKSPGFGDRRKAMLEDIAVLTGGVLISEELGLTLETVEIEQLGQAKTIKVDKDNTTIINTGNKEQIKERSELIKKQIEDSTSEYDKEKLQERLAKLVGGVAVINVGAVTEVELKEKKHRVEDALSATRAAVEEGVVPGGGSTLIEVAMYLDTIDTSKLSYEEKQGFEIVKRSLEEPMRQIISNAGFEGSIYIHQIKTEKKGLGFDASSFKWVNMIESGIIDPAKVTRSALQNAASIAGLLLTTECAITDIKEEKNTSGGGGYPMDPGMGMM

SEQ ID NO: 195 - protein, 253 aa, Borrelia afzelii
MLGDFMYKLVLVRHGESEWNKENLFTGWTDVKLSDKGVDEAIEAGLLLKQEGYFFDIAFSSLLSRANDTLNIILKELGQAYISVKKTWRLNERHYGALQGLNKSETAAKYGEDKVLIWRRSYDVPPMSLDESDDRHPIKDPRYKYIPKRELPSTECLKDTIARVIPYWIDEIAKEILEGKKVIVAAHGNSLRALVKYLDNLSEEDVLKLNIPTGIPLVYELDKDLNPIKHYYLGDENKIKKAMESVASQGKLR

SEQ ID NO: 196 - protein, 360 aa, Borrelia afzelii
MAIKKRKFYKRFIYKELVYMKRKAKSILFFLLSTALFAQETDGLTEGSKRAEPGELVLDFAELARDPSSTKLDLTNYVDYVYSGASGIVKPEDMVVDLGISNWSVLLTPSARLQAYVKNSVVAPALVKSESKRYAGDTILGVRVLFPSYSQSSAMIMPPFKIPFYSGESGNQFLGKGLIDNIKTMKEIKVSVYSLGYEVDLEVLFEDMNGMEYAYSLGTLKFKGWADLIWSNPNYIPNISARIIKDDVPNYPLASSKMRFKAFRVSKSHSSKEQNFIFYVKDLRVLYDKLSVSIDSDIDSESVFKVYETSGAESLRKLKAHETFKRVLKLREKISMPEGSFQNFIEKVESDKPEESSSEN

SEQ ID NO: 197 - protein, 466 aa, Borrelia afzelii
VQIKEIYFGPKILDDKNSNSKLTNFDFKVVSFELGSDHYLVDIMQVKEIRKSSNFTYVPNAKKYVAGLDNLRGEIIPIIDLRIMFNLEFNKKDLEDIMVLKHKDLLIGVIVDKINNVFSIDSSLIQDPHPVLSQDSLINYIKGVVDYNEKLYILLDVFKIFNYGEEERVLTSGQNFVEKTDFVDDCGNLDILENAKSNLSNNGFSKNTNNNENSTVNNIAAFNLENIKKNLLKFSFNASLVNDVFLEKVGVKFNMVDTDCLPYDSFLNEFYSKSSGNLWGADCLEEFQNEIVKNRLNFMDNLNSIFNILEIGCGNGRETMALVNALSEYYVGPFKLTAIDNDLSKVVETSRLIFSESEIGISEIYRRNSFEQSPGVYKFKSEILNNVLFEYSDALFSDLPDHLGMVFLKDVLCFLDSKDQILILNIIASKTIKGALLFLGDNEELKNNDIFIKEKSTKYFNLYRRV

SEQ ID NO: 198 - protein, 753 aa, Borrelia afzelii
MLLKLKYSFVGFLLLFLIFILLLFSMIFNFVLCGYLEDYYKQLTRAQLRRAAFSTQSFLDTLYVIVSGAASNLALETISEFAIYENRGKDFSESELIDLRKNPKFVIDSVKVNKKYRQYLYNFMANLKNDTFFEEFAFFDFEGRIIVSTRHENNMDFGHSEANTNYFKKAVEDYKQDQLKFIGWYSNLSEGISAEVAIRSRQSEKKAFAIIVPVYSPEDKLVCGYLAGYLLNDVLADSFDRFRFGFYKRGNFIYVDPNNIAVNPFEEYNEISRVSSKFLNTLKDVFSKPPLLSNIPTEVSVYTIDRIFFPEMGEECYYALLPISSKLGEKGGVLIARLPYKDIYGVISSIRFQYVLYSALGIILLSIVLLARIDRVISFRLNAIRVLVQDMVNGSLDKDYALDDGDDFSDELSMLSLRVVKMKKAISVAIASVLRNISYVNKASLEVASSSQNLSSSALQQASALEEMSANVEQIASGVNMSANNSYETEQIALKTNENSHIGGKAVEESVIAMQDIVEKVSVIEEIARKTNLLALNAAIEAARAGDEGKGFAVVASEIRKLADLSKISALEIGELVEDNSKVATEAGVIFKEMLPEIEETANLVKKISEGSSKQSDQIAQFKMALDQVGEVVQSSASSSEQLSSMSDKMLEKSKELRKSVLFFKIKDSKIENLEDGEYDFRLMDCPEDSFKDENQDLKSNGISTLNGSRHNNHSLSIESEPSVRAINKRVDPKKAIDIADKDLNFDDDFSEF

SEQ ID NO: 199 - protein, 317 aa, Borrelia afzelii
MDLISFSVPGNLLLMGEYTILEERGLGLAIAINKRAFFSFKKSDSWRFFSKKKEIDDFSLIENRNDFVFKMFAYLNQNCFFNLESFAYDVYIDTSNFFFNDGTKKGFGSSAVVAIGIVCGLFFIYNATNVVEKGEIFKYCLEAYRHSQGGIGSGYDIATSIFGGVVEFEGGFAPKCRQLNAVEFNDFYLMQGLQAVKTTDSIYEYNKHRDSILDFILKCNSEMNKLVLNVCSSKSALISSLRKAKELGLAIGAAIGVPAALPPSFAHLQYQCDLIKALGAGNETFLVYKPNIEAFDLPKIIPIVLEHESIKFESGKC

SEQ ID NO: 200 - protein, 523 aa, Borrelia afzelii
MEYLQTTSSIKAKFDIVAIVEQYIKLVKSGSTYKGLCPFHAEKTPSFFVNPLQGYFYCFGCKKSGDVIGFLMDMEKINYNDALKILCEKFGVYYDDLKISRESVKKNENKDIVSKIYSLNSRLINTIKFFLNKNKKALDYVLKSRAISKEVVDLFELGYLPLNVKDGLELHGFLVSKGYSSEILKKSGLFSKINPKASILSQRLIFPIKDFKGNVVGFGGRDLDGKGSKYINLSETEVFKKKELLYGFYEGLDEIKSTKSVILVEGYIDVLAFFTSGIKRAVSTLGTSFSKEHLVLIQRYADEIIFSFDGDDAGLSATLKAYQICLPFNINVSVVKMDFGRDPADVLKSEGESSLQEILNNRCDVFDYLLDVYSNKYDLNKTVDLNAMINLFLNLINLSKVDTQKNIFLDKLSNKLGIGVTTLLKDYYRIKERFAVDNNKRNLYAHNDDSYERYLIVALLKNFSYFSIIRRNIIDSDLIDVDARKIFMCFENLFENNEDFSLMDLKRNSKDNYKISEFFLKKS

SEQ ID NO: 201 - protein, 225 aa, Borrelia afzelii
MEKLVFKENTIYSSKFDDIYYNPKYGLEESFYTFIKGCNLDLELKTKKNLLIAELGFGTGLNFICLLKFIKENNITSKINYYSIEKFPLQKKTIMKISKLFVKETVYFKLMLKHYPKIPKKNLKLKITENVNLKILIGNANIKIKEIPKNVEYWFLDGFNPKKNPKMWNNEIFTLISEKSSPGCKLSTFSSARIVKDGLKLANFKYIHIEKGFGNKRHMIKAQKN

SEQ ID NO: 202 - protein, 663 aa, Borrelia afzelii
MKKMLLIFSFFLVFLNGFPLNAREVDKEKLKDFVNMDLEFVNYKGPYDSTNTYEQIVGIGEFLARPLINSNSNSSYYGKYFVNRFIDDQDKKASVDIFSIGSKSELDSILNLRRILTGYLMKSFDYERSSAELIAKAITIYNAVYRGDLDYYKEFYIEASLKSLTKENAGLSRVYSQWAGKTQIFIPLKKNILSGNVESDIDIDSLVTDKVVAALLSENESGVNFARDITDIQGETHKADQDKIDIELDNVHESDSNITETIENLRDQLEKATDEEHKKEIESQVDAKKKQKEELDKKAIDLDKAQQKLDFAEDNLDIQRDTVREKLQENINETNKEKNLPKPGDVSSPKVDKQLQIKESLEDLQEQLKEASDENQKREIEKQIEIKKNDEELLKNKDHKALDLKQELNSKASSKEKIEGEEEDKELDSKKKLEPVSEADKVDKISKSNNNEVSKLSPLDEPSYSDIDSKEGVDNKDVDLQKTKPQVESQPTSLNEDLIDVSIDSSNPVFLEVIDPITNLGTLQLIDLNTGVRLKESAQQGIQRYGIYEREKDLVVIKIDSGKAKLQILDKLENLKVISESNFEINKNSSLYVDSRMILVVVKDDSNAWRLAKFSPKNLDEFILSENKILPFTSFAVRKNFIYLQDELKSLVTLDVNTLKKVK

SEQ ID NO: 203 - protein, 356 aa, Borrelia afzelii
LDLLDLPEKEKQIKIKGVFMTKPKIFSITKEKIKIFLIIVLTSTFLLGIIFSNENKVARILEEKFFDFDLNLISKIETEFEGTLTKLDKDWVLTYNKQNIPVDNKKVNSLIKALDELQKNKLVSRDQKKHKELGIEENPSFKLFDNNNKLLTEIFVGKPGEGDSRLAYIKGSDENVYLTKNIFLSYKGNSYNTFSDTALFQEKNTKLENLSFKMIRKLNKENENNINNDYEITTKDGLYFLNNQKITKERPLNIIAEFKADGLEIDKSKIDDYRLQYKIEVKWSNKSVNNIEVYFNKNEENDKDILIKKDKDEYYYMTSKWTFFDVFNLEKKLIEKDNISSNDNQEDHHEHNNNTD

SEQ ID NO: 204 - protein, 309 aa, Borrelia afzelii
MINVEKVTKMYGSFTALFNVSFKVEEGEVLGILGPNGAGKSTLIKILTSFHYPNKGNVKIFGKDIVEHSKEILQQIGYVPEKLALYPELSVKEYLKFISEIKGVKKFKKEIDKVITIFKLKEVEDKLISQLSKGFKQRVGIAGALINSPKLVILDEPTNGLDPNQIIEFKEFLKELAKESTILFSSHILSEVESICKRIIIVNNGIIVADDTKENIIKNKLKEIEIELIVLKKSENEKKFFNSKNDIFTLMQLEEQEKDLKISLKLSQGKTEEDLFNYIVKNNIILKAMIPKHESLEKIFSKLTKEREK

SEQ ID NO: 205 - protein, 109 aa, Borrelia afzelii
MELNEYQEKAKKTAKYKNKKEELILTTLGLAGETGEVVEKIKKLGRDKNYIIDDEYLISIKKELGDVLWYLSTLSNNLGITLEDVALTNLKKIQKRHENGTINGEGDDR

SEQ ID NO: 206 - protein, 348 aa, Borrelia afzelii
MTILPKIAKDIINAYDQKILPNAILLLGEKFSSKKISAIELAKKILNEKNLTNPNLLIFSNLDTIEAKAHLSADSYKIANKYLEYIKTVIFTKCYFSNEKNLKKIEKNINYINSVYYKKEYNINIKNELIKNIENINKELNHSINVHDVKKIQTWIFSEKEKSKVIYINEIENLSFNVHNSLLKILEEPPSNIYFILAARNKNKIPKTILSRLRIYNFTKPEKKLGIQRFKESFLIDKDITIEEYFASFYKEESKKIKKELTKILNIIKEKKSIFNLEEIDFIKDDQSFKIFLNELSINIRKDFLENKININQYLKYTEHLKNIYRYRPYNQNKKLIIENLMLNYEEI

SEQ ID NO: 207 - protein, 336 aa, Borrelia afzelii
MNKLMLMLITFATSLLAQTNETSTGLKAEQSFNNNLSESVKLTEIADICPTNTIFLTGTGIVVGLHEKGDSLKQKDLISKILEENNTIDEISLNNIESKNIALVNVSLQIKGNTIKGSKHKAYIVSILDSKDLTNGILLKTNLKNNEKEIIAIASGIIKNNNKLKGYGHTSEYTLDSVIINENQNINYGYNIILKKGNYTLINRIHKILTSKKINNKIKSDSTIEIEVKNISLLEEIENIEIETTPKILIDKKNGIILASENAKIGTFTFSIEKNDQNILNNNNKTTIQINSMKLNEFILKNSNNLSNKELIQIIQAAQKINKLNGELILEEVDGN

SEQ ID NO: 208 - protein, 394 aa, Borrelia afzelii
LRKDLIFLVLIVLIIVGVVIFFIRSSKKELVYFELNTKSNISFLFLVEDLNKNLVSMQEIFINIKTGNLGFLDIPIHTGYEDLKGNISWFKDLYKKNSFNKFLSKIYTQLSHESDYYIRFQKENFVRLIDYLGGVRLLVKNPVKVYSFEDSILIPSGTSNFDGDKSYNYLRYFNDVNHFEERGEFFKEFFKKLLFQISDFGIENDIFFKIYSMLDTNLSEVVFKYIVKNYKINNDKIISINIKGQEEIFKDNDNNLIKVVFPYYGGAILKESVDKLNKELINEGSEEVVKIVVLNGTKVVGLAKKTANIFNSLKFKVLKFGNADKNSYKNTLIINNSDNLEMAVRVGEAIKASNIKPISEVQTKRLLELDNLDINPDVIVVLGDDFDGRYVKSK

SEQ ID NO: 209 - protein, 639 aa, Borrelia afzelii
MNGNNNMNNNGKSNNKKKNKNWILGLVVIFLISAIFMSYFIRGGESYKNVPYSTFQSYLDNGLVESVVIIDKNLIQFVVKGSNFAKSYFSTSIPYLDINLLSELKSKKVELSSGKSQASLIGVLLQTLPWILFFIFFFFIFRQTQGGGGKVFTFGKSNAQKYEAGKNKITFKDVAGQEEVKQELREVVEFLKNPKKFEKIGAKIPKGVLLVGSPGTGKTLLAKAVAGEAGVSFFHMSGSDFVEMFVGVGASRVRDLFDNARKNSPCIIFIDELDAVGRSRGAGLGGGHDEREQTLNQLLVEMDGFGTHTNVIVMAATNRPDVLDSALLRPGRFDRQVTVSLPDIKEREAILNIHSSKTKLSKDINLQVIARATPGASGADLANLINEGALIAARNNQDEILMKDMEEARDKILMGVAKKSMTITDRQKLETAYHEAGHALLHYYLEHADPLHKVTIIPRGRALGVAFSLPREDRLSINKHQILDKIKICYGGYASEQINLGVTTAGVQNDLMQATSLAKKMVTEWGMGEEVGPIFLVDDEAPIFLPKEFSKSKAYSENTADKVDREVKRILEECLKEASDILVEHKDQLVKLAKELVLKETLTDKEVRELLGFEASKDEYDLFAVDSTAKEVKGEDTKG

SEQ ID NO: 210 - protein, 1467 aa, Borrelia afzelii
MNLEFLKNKTFLLLILPLLVFVLIIFSINLFVQVQIYSAKFLVVKYLESKFGFKIKYDNISPYFLSSIKIDGLELSLDGKDKILMDVVRVDLNLFKLILGDENIILNVYVKGSNLNFDINDFSLSDDLSSSSAYSDNGNVILNKILNYLYRLNINLENININIKLNKHNSWLNFKVRNFSLSTVDEDFLFSSVVDFSAVKNLEINLPAERVDDGVLDSTFYFEGKFKKGFEDGYINFSFFELKTSYFSLLEQGFQINYSKGNLKIFNLQRENFDFNLSYDKANGFIRLDALFFNVNLLNWIKLNKDFEIYKDYFDISLNGQLAFSYDFKDKDVRYAGIIDSSLNADTIGKEIQGLQLKIKGNDSIVSVENAFLKLKRGVVNYKGYYSLKDLLPIGRLNFKSAKILNFNDLNGYLDFKKDKNIFSVKSDSFSLGNLSFQDLSLKTYFLKDKIFVDYLIYLENKNSQISLKGDLNDEEFSFNLGIKEFPLLFLKEVVPSSYLINFFPKTLFSGKYLNLVSDFNLNKFDYRKNRLKKFNFIVFSKLDNFKFMFDASGEKNFYKSNNFDLQYNDYNLHSSLFVELFESGFNISTNFSYLDKNYPLNFNVNFKNKFIVAESPLGIKLDFNYFDSKIIYTLNVNGFKVYNKTSDLLININFHGNYLELNNDLKFRIDKFNIIKASKIPAYNFNFGFKGLYEYDKLYISDVKFINKLSNLQGYGQFNLKDNFNGSLNLFSSLNSERYFLGVNSDEYGSYFLLKFQDLDFYNFNSLSLLEGKVNGNFLLNFKNNDFKNYSLSGYLEADKLTLLGIPMQFSLNLGLLDNRLNIYDIKVKRNKKEFLTGSLRYDLGSSIGVSNMVFNSDLFSYKFNANFRNFESRDEERFGVLKTKTEGEFSFRDIKYKNEFLSNLTVEFSNDFEKFNMASIDYDLIDVLYHYGNGEYSFILKDYLPLSFNSSGKIIKNKILGNVRDIKFDSKIITKDFLDSHPLFNIDNHFILYDLFLNGEFDIDGDLYNPNINGSLNIQKGLISTEYLRASRKFGGDRTLEIFDMPVEIQDNKIIFSNEFALDRYSKVFVSTSLNLNFLSDTIIDYYKIDINVTGRTGVPIKFDKIALSFTGYALGNFSIEGNADEIMFKGILNISNAWVYSLESSIVNLLVNPFKQAKRAQTVDINVRDFDILTHLEINFDSGVTFHWPDSNISFLQATISRGDKLVIKSDTKTDDFILKGDLNIANGFVNYNNKKFIFKSGAYISFNESRIKFDPWIKAEATNTIKDRNDKLLVTIGIDSPLSLWKIEFMSYPSRSEQEIKYLLSGSTMGGSEGGLRSAGTNAAEMAIGIVSDIALDFLIQPIEDYMRSVLNLDLLSIKTDILKNSINSNFFKIGNPTFVDVLDNTSVKVGKYFVEGVFISGGFGFLKEQTTPFSKDLNFVINLGIEFDSPFFLVNYEFDYNFMKKGLDGIGNNIGISWKFKY

SEQ ID NO: 211 - protein, 177 aa, Borrelia afzelii
VFFLILPLFFLLSFNVFSIDVIKIGIVDFDRIVIEVLNPQLKANLDQIKNRYQEQINGLNLELKNLKQMYDKSIADNDLDNARSFGNQYNLKVDELKRVSSLAKNNLEQQRLANINSLNNNSESLSKILHGIQYVAEINGFSLIMKKNNPYILYHNSTVDITDDVIKYLLEKYNKNP

SEQ ID NO: 212 - protein, 279 aa, Borrelia afzelii
MLKIILKTLTKIIAISCLIVGCTSLPYSPPKQNLNYLMELLPDANLYAHVNLIKNRSIYNSLSPKYKSALGLINDLYFSYKKENNDFALLIMGNFPKDIFWGIHRNRNTESIGNIFASPKWKLKNSNIYITPNRARTSITINQKDKTLKEHNILTTKYIKEIEENEMFFWIQDSKLLLSDQIASSKNLIPFSSGTLSINRLNQNEYIFKSLLQTNNPSILKILSKKLIPTILTSMSNLTISSPVKATIKDQNTVEIEFNIQKSSVENFIAKLASNIQKT

SEQ ID NO: 213 - protein, 312 aa, Borrelia afzelii
MKKNILAKYILILVSLLSCNISAPNELGNKKTEKKGGGGVLGFIEKIQEESIEGVKQHIEKREKQTMQTASVKPVNVNRNFLYYPQEEIKIKEEVLIPSTDEEKRVDKAISDGRLEFDKLVYNENKLKNEFEQLESSFNNVYDKISKLKDAIQTEAHIVERINHIIKTRPEKREYQNRVRQNQSEERALINLFNQLLEKRGDIEELHTQLDSGLSERASAKYFFEQSQKTLKDAITQRVKSEHRSWSRREYGGNLTRKANREIDNALEQLKTSSSKIIKAMEIKERIEQLLQEVKSFLASSRSKICFHEIDL

SEQ ID NO: 214 - protein, 173 aa, Borrelia afzelii
LKKTIIIFAILAFLFNCTNKDNDTTKLNNGAEEDSQTLQSKSDLVDEDRIEFSKTTPLEKLISKLNLNSTEKETLTFLTNLLKEKLLDPNAGSNFKNTGGDESKIEEAIHQFLSDLKEDEIKEMLAKIKENKDKKEENSEELNTYKTILASGFDGIFNKADSKTVLNNLKDAV

SEQ ID NO: 215 - protein, 280 aa, Borrelia afzelii
LKIVIIFVVVLILGCSLDNNSKMENEGGGFKENGLDRLGQEKRALGSSNFRSLLDDSGVGSNFQNYEPLKALENKNKFINYNQIEFLEGTKSVNLYLWSTYIRWVKIKARDLCDERGNCIKELNGIKYSYLVSPIDGSYISYAMPLIIFETTSESDPFYSVSGFKLINKGSDINFNDNKGGFLGRIPMSEKSVESGLVTAYPFGSSDSKRVVEAFTALYNNGIWNDMIAEITIKSKNPPQNEKVYRISLDSKLFNVTMKKIIEKYPNIKNTSLTFNSLIN

SEQ ID NO: 216 - protein, 181 aa, Borrelia afzelii
VDIKINKRNLSESVREEEQALIHYNKLKEKLNINFQKEIYCKLEAMKVLKEIKDKEYYRLDNYSNFDDFAKDYRLARTQTYKYLKIATAIEEGLIEEKYVVKNGINETICLLKTKESPSLKKSTQNPIKPLRFQLKKEESYSFYKKNAKLTSFLLEKIFFEEKDFLLKIINEFESSRNKRK

SEQ ID NO: 217 - protein, 169 aa, Borrelia afzelii
MIKYNKIILTLTLLASLLAACSLTGKARLESSVKDITNEIDKAIQAAKDAGVNTDAFTETQTGGKVAGSQIRDAKKLVADLTIEFLKATEEETITFKENGAGEDEFLGIYDLIYRTAEAVEKIGMKDMKHTVTQEAEKTPKTTADGIIAIVKVMKAKVENIRKKQTKDK

SEQ ID NO: 218 - protein, 528 aa, Borrelia afzelii
MNKKKIPLLTLLIIFVNSCTISKTKDDFIFGVGIGNEPTTLDPQFCSDKFGTLIINELFIGLLRGDPKTGGYRPGLAKNWEISHDNTCYIFHLRDDIYWSDGVKITADTIKSSYIMALETEESLPNISLLTSKIKNAKEFYETKLNPDEVGIKVINEKTLEITLSQPTTYFLDILTNPIFIPVPIHIIKKFGNKWTSPENMVTSGPFKLKRRILNEEISLEKNKKFYDAANVAISELTFVTINDARRIYSMYEHNEIDAIFNNIPLSLINELILREDFYSTDINQIGFLSLNTNVKPLNNPKVREALSLAIDRETLVYRVLDNNFKATRKMVPNINNYNYGKKLKLYNPRKAEKLLAEAGYPDGKKFPTLTIKYNKNDLRKEIANFIQSQWKKVLNIDIETEPETWNNYVSNILKGQYEISIRSWQGDYLDPMAFFNMFETENTHFSSYGYSNPELNELISKSKFEVDEKIRLELFKKAEEIIIENDYPVIPIYSAAGNYLFRNDKWTGWNTNNSERFALSEIKPLED

SEQ ID NO: 219 - protein, 216 aa, Borrelia afzelii
MKGISILSLLLLAFSCKQYGSVKALTEIASDSGDNNSLVVSDNLSAKEPIAEKGPTLTSQESERLEALKTFLKDAMGVNGREDNLKAEYEKSYKEFFDWLSKDVNKQKEFVSCFNNICGIVTKAVDADKQRRHDQKSLGFNEYVCHKIKNSTGGALSLFFQKVADAFGAEEYKKKDDESSQKPEKCNEEIFKVIKRVFTESDSNNELKNLKNHGNI

SEQ ID NO: 220 - protein, 399 aa, Borrelia afzelii
LKDKLIKILNKFLMLAPLLIISCNANMNTNDKNKALNEYKLQNISEVIKNSLQIESDFKKELEANINKSTPPILEIEKIELGKQEFPLKSESNSEILIPLEDTNIAKSEEEIAKIQEKLLLIGAPDEIAEQELDPNKKPLHLTTIEFKISSNAEEQEILNPIEEETNINIKDKIFDQKEENSTLNESTKTSTQIQFQKQSTYLSEDGNFITKEYAEQVRESLDKTLNAIKNLETSKDLEIENEIENLSKEQSSANTSNNTSANNINTENIEKTKNKLLEKLKKSELIFEETKDPLGTSTIKQVLDAANKWQEQENSSQINWDLGSKFHPNPKLYNKSVAQEYKVLAEKFTKVKNEYKNTKDQLEVHSKLTTSNISKIIDATKEFTSQVRNLISLVENAH

SEQ ID NO: 221 - protein, 293 aa, Borrelia afzelii
LKKNTVYKILKLFTITLLFSCSFYSKSNNTEAISELQQNSIEIKNSGIGKTENLKNIQNLQQNQLLNNEKEMVIKNFTQRLNENEKLIQKIGPNISIFAPKINKDVLKIEPIDQFRINKNTFPENTQSHILNLTLKDNQIRRLFYSSLDYNENKIKKLISILEQASSSTGYHYNVIGLIFWTGFKTQESFEKAVNLLTKNEQRRLMFNFDTKTVKDIQEKFEKLMQNRNDWIKTVEKIIDEYDNNIANVKADGMILGEMLRLEYEHKLNPDESMRIANDIETLLKACCDHTHY

SEQ ID NO: 222 - protein, 365 aa, Borrelia afzelii
MKEIGISIYPNVSPKNKIIEYLEKSAHFGFTQVFTSLLYINGNEFDVFKELLNIANKNGMKPIIDVSPNIFKELEIDLSNLRNCTKLDYFKKLGAWAIRLDNTFTGIEESLMTFNDSDLKIQLNISNINKHINTIMYFKPNIKNLLGCHNFYPHKYTGLSRTFFKETTKIFKHYSIPTAAFISSNNAEECARGKEKEGVPTLESHRSKDIETQAKDLFKEGIDTVLISNCFPSETELEKVSKVNRNVLELKADLNPKATPVEKEIILENLHFNRGDINSYRIRSTMPRVYYNNKKFPVHSPNEIKKGDILIDSSKYLGYAGELQISLKDTPNNGLTNVVGKIVSEELYLLEKIEPWEKFKIIENK

SEQ ID NO: 223 - protein, 530 aa, Borrelia afzelii
MKVLIKKLKAVLFFNVILFISCVKENDGHKLVFKLNIGSEPATLDAQLINDTVGSKIVSQMFLGILDGDPRTGGYRPGLAKSWDLSNEGLVYTFHLRDNLVWSDGVAITAEGIRKSYLRILDKETSSSLVNIIKSTIKNAEEYFDGKVNESDLGIKALDEKTLEITLKSPKPYFLDMLVHQTFVPVPVHVIEKHGQEWTNPENMVVSGPFKLKSRVLNEKIILEKNNKYYKSKDVVLDNIIFFITDNSITAYNMYLNDELDAIFNNIPPDLLKDLKLRDDYYSIGTNSTYFYSLNTKVKPLDNVEVRKALSLAIDRKTLTESVLNDSSIPTRRATPDYIDYSYKSNLSLFDVEMAKKLLVDAGYPNGKNFPLLKVKYNTSDRQRKIAEFIQNQWKKNLNINVQLENEEWSTYINSRVNGNYEIIRAGWSGDYADPMTFLSIFKTENTAFSSYGYSNSEYDKLLIKSDHESNIFERQEILKKAEAIIIERDFPGIFINIISSSYLFRNDRWKGWEPNISERFNLSEIKPIK

SEQ ID NO: 224 - protein, 403 aa, Borrelia afzelii
MTNKIIKEALTFDDVSLIPRKSSILPSEVSLKTQLTKNISLNIPFLSSAMDTVTESQMAIAIAKEGGIGIIHKNMSIETQKKEIEKVKTYKAQKTINTNKVTNEQETKMLTKQYLEEPEIHKNTEHKEDFSNACKDLNSKLRVGAAISIDIDTIERVEELVKAHVDLIVIDSAHGHSTRIIELVKTIKNKYPNLDLIAGNIVTKEAALDLINAGADCLKVGIGPGSICTTRIVAGVGVPQITAICDVYEVCKNTNICIIADGGIRFSGDVVKAIAAGADSVMIGNLFAGAKESPSEEIIYNGKKFKSYVGMGSISAMKRGSKSRYFQLENNEPKKLVPEGIEGMVPYSGELKDILNQLKGGLMSGMGYLGAITISDLKINSKFVKISHSSLKESHPHDVFKMP

SEQ ID NO: 225 - protein, 212 aa, Borrelia afzelii
MKKNTLSAILMTLFLFISCNNSGKGGDSASTNPADESAKGPNLTEISKKITDSNAFVLAVKEVETLVSSIDELATKAIGKKIQQNNGLGANADKNGSLLAGAYAISTLITEKLKALKNSGELKAKIEDAKKCSEDFTKKLAAGHAQLGIDGATDNDSKEAILKTNGTKTKGAEELVKLSESVASLSKAAQEASANSVKELTSPVVAETPKKP

SEQ ID NO: 226 - protein, 364 aa, Borrelia afzelii
MKDFLTNTKSPNCYNKHQHKLIVLISTLKYVNKKYKKYTQQNILYYFNENLKRNGQNPVKLKTLQKYLYELEKKFKVTTNYYKHLGINCGTEIYYKLNYPKKECHYMINKYFKDKKHSRFEKRAEIGLKDKFNKNRCVNLEECLSNKNNNIKEEKNKQIEKFQIIKYSNKCNFKCKEILPFILYLDINKDLKIKMLKVSKIIEIKLLKHKNIHFNKSCFKDKQNKLKEILKNTKKQLEKKGYNPEQLETEFKKIYENYKLKPHFIIEYQKYDDLSKIKRKLEKSIELKKENPQKDYEHIKTNIFNILIEQLKEKANIEFIKPIIKTYLNSKKKLEYNKVFDIYNCELLELIKNENNSLMLKEVV

SEQ ID NO: 227 - protein, 1081 aa, Borrelia afzelii
MKLDEIIIPLSMSISNNQKLDSIAETLKKIAEQKFASLDNLKSKLEKSTASGSNLEKALNKSSQNASKNFKSLANSVDSVNSKASGMKSIGKVLKSVGKGLGSVKNLANKTGEAFNQMLAAFAPIIIAVKALQAIGSTISGIFDGAMDALDEFNEEVSTFSDMLGNEELGKSLAESMRAFGDETLFTRDAIANATKTMLSYGATASEVEERIRMFGEAAGGSSEGLEKLAEVYSRVESSNQVNLEDLYALRDAGVDITDILAEEAGLAGEALYKAASDGQIGFEALNKALSKATSEGGKFYGNTAKEAKTLSQAQQQTAKMSEKLFLDIGKALEPMMIGFEKVKQFLLVAIMVPLTKVTTATIYLTTKLGELVVYLSGKWLEGVKMWFKAISTPFVKLFEGIKYVFNKLKELAKYVSSVFPERFKSAFEPIIKWFQKLLDMASKAYEKFKNIITFWKKSKKEEDTPSSEPERDKKVDPNAKTDYNKKIEQDYKKLQDEIFFAQREIYSKVGVEREKALRELEKTIKKKNQKFLNTYSKRFDELSDENKKILVGVEKAVNEFNNSNYDFVNEYQELLKEKESRERKILLTLPHTDQESALQKLNDEINGKNKAFVEKYGKSFETLNESNRKIVAELEKKVKEFEKAALDRSFVEAQKALQKNILALEWETMLLPAKERASAEKKMASDIQAMYKKFVDEHKSQFDNLNETNRNALKQMAEKAKDTAKSLYDKCLENLDKFTEFTGKILNQEVGEKAGSEGFDYAADSATKGLVDFGKNTLKAVGASFGPVGQAIAEIVIQIGEFLWGWFKGAEKARIKKIEEQRDKDLEELEKRSEIELKKLEEKFDAEIAMRKEKLSELDDEYSKEIEFLKQAQSKGQISGEEFQKRLHDVQTEYKTKKGIETTKLTKVEETKKLEVERQNKFSKLETERIKAQAEVDKVNTRMWSWSKSSDLEKAQKILDEILKRIATVKSAGSIEEIKLARGGARFVSNKPTYMPNSGVMSSEFGQPELVRITPAPIDENLRKLEAKIIAEEIAKLQKSQSSTVVNNFYYNFNGDVLDAEKLVRMLKSKEHLMTFRMAE

SEQ ID NO: 228 - protein, 142 aa, Borrelia afzelii
MVINVNLTGKVMLPYIPDYIRNSKEKIKEEEKAYVVLKDINYGFVEKLKARQIELFKKLNGENGKTNSNAMIESTSAQIQFVKKIWDENVVEFVGLENQQGEVITKEMVESDGILFQDMLSSLAIEINFLADTLRVERVSKK

SEQ ID NO: 229 - protein, 396 aa, Borrelia afzelii
MRLRRLPIYVNAYKEKPNAEIFIYYSSRGTGKTYDIATVNLERKFSVDGGDTLAIRKKKNKTTQSIHKEILELLSIYGLRKFFNISKAKIESKSLIFGKKRAFVFEGGHDTRDLKSYAHFKDLWLEEANQFSSDDIEMLIPTMREQGGRIYMSSNPVPKSHWLYKRYLANQDNPAVCIIKSTYRDNPFLNGGDVEAWLEKQKLAYHGNDIGFRIEVLGEEFDFGTARLIKKFNVCEPSLISRANGSYYTGVHIKGNRICFLEILVGRISYLPVVIVTNACSKVLLSKADYQAEINNFKGTFVLPAAREELKYVFSRFGRGTLLAKKRNLYSLSDYLIPANLSVVNIPETNDVISEFNETEYYYDESSAEDSEVTNFVMQKDLTYIPAFLNAASIFN

SEQ ID NO: 230 - protein, 260 aa, Borrelia afzelii
MISDEDFEEIKKRLQADNIKFQFGVGTMEEAKNYVGKLGEPIVVKDKELFAICNGQNTTNRKYYSLNKNTKPPIGENLEDYLEHLVNWCLENTYPGFLTAEFAKEGTLSRSKLVKAFEDTKKFCIPDGRSLPESCFVKEKFGISSAPNLSGRFLRHYDSGGYTDSDGSRSLGGTQEHSLEKHSHPIDISDLKKLKGRLINDYYYIRRDSNWSSGSTSFLTGIVYGDGIYYWNYPFKTEDMGGNETRPKNTCYISFYRYDW

SEQ ID NO: 231 - protein, 874 aa, Borrelia afzelii
LEEQDNTVQGIDLESPEITGQNPEISSAKEDTTQDCTSLGFDIVFYTDEGQIFELTPFVDISSIVLEEKIVDPSLKTASSNFSFSVSGLSEDFLNFLFFRNEDIFVKVSDNKNPVFTGILEKFFSRDLFNSTKSVSFTVNDYSSLLKIAFENPVQFPINFSPDWLFVYNPLAKELSLVHLIIGKTKLKDLIDDDASEAILDKVPAVIIDCGENVETILQALLYEFGYAYTFSPIGKLKILPIWKSEVINREIEICTIDAESYVMSKSSSSSYDSTKVIWREGKFQSKEESISKKRPLYSAPINVAGNDGKLYVAVLQKGVVYPDFADKVGSSVFQEYDPSWLDTVYKWDFKRREVWHDHYAINEHLAIISTHNLEARFSADSSIKLENKEYFPTKAKLWFRNTSSSQGSKYIYHFDIYGDVFYTIAQNVIQTDNADDFYSKKFEYTTRFIFSEESAVRLFEFLTNLRVKGHTIVNFRSMQNLNITDFVKLRPDNIGIDHFFLILSKKITNFDLDIKLYEYEGITWGDYTHYEYLTTSTKISVSDYLSGVNKVVIAPFNYNGAETFQFKADGFKDEDTLNTAIEFAKQAGLNKIKLLNGDFYIYDQVNLNNLEIQGKDEVTIRSTGFSKHIFTSEKSFKLSGISICQQPLSELYINGGTLNQEELSMYLEDKSFTHPHGVVFCSSYSVKENARSSVYVTDVNFVYIKDVTFRCALNNALYLKKVKKILLEDVDFDSANQGFEISDAKNITLVNTNIKSSKKESVASGYNIMIRESSFENNNNALKLSNFSSVKILDSQLSKNKGTALHLVDITIARLNNNVFVENKVGLENHSFDLIIQDTFLKNTLALDLSDSKGRIIDSSTYSENTKDKQGAA

SEQ ID NO: 232 - protein, 137 aa, Borrelia afzelii
LALGGKMKIRMKHLVRRLYLRRDKIWHVYMSTEIQNKAKDKSITNFPNLKPEDLDYEYVYKFLDEWIQKKYNANKLGFTIEKVDGLEYICKAKRYASLKKILTKIFKDYKDIFLGRLQKAPGVAAVPGSTGKGQGGS

SEQ ID NO: 233 - protein, 200 aa, Borrelia afzelii
MKVALTTNTTEEQIYKEFLRLGMEQLIAQDLSKRYYHNVLTYRDLENLEKQFGIKFDNLISEISFVEKNLDTKIDGIKNELNAKIDGLSIKVDNLDAKIDTVEKNLQKDMSNLAQDLRKDMSNLAQDLRKDMSNLAQDLRKDMSNLAQDLRKDIQINSKLLSEKLKVSNRIIILITVLVVPIAISSMANIVMSIIDSYLK

SEQ ID NO: 234 - protein, 1278 aa, Borrelia afzelii
MKTNNIVKTNDLNISLYKELSEDFIKKENINKLKDFFILIKNKLSSIDDNSTEANIEALLRSIFEKLNYSVEQQKGGQIEGVDSRVDILLFENDKDKVDFNNKLEEAKKNNEPIPAEDILLIVEVKRPSFSFNTKDKVKEAEDQLYRYLNQYQKHYGMLSNGKVWRLYDKSKVLYGEKRYIEFDFSKVEEKEEYKEQEWFVLFIYLIRKERYLKTSNVIEIEKEQISKEKEIIQKTLREILYEKPDDSVIFKIAKNIYDKEFKVSDKEITQHILASILEESIIFILRIFFIAYIEDNEIFKKILEENKLYRSSISFRYFFYDENTKNKLGYKKIITIFNLLDKGSDAIKFPIFNGGLFAEDKVKYLNNESLLSISELEEILVKILFFEEKNIKDEKFVEYSKLDPKSFGELYETLLEYDLRIADTTVHRIVEDGVYLIRTEEELENKQVNKVATYYKGNIYLTSRSLDRKKSGAYYTPDDLTDFMVISSIEEQLKTKSPLDIKIIDNSCGSGHFLISCLDYLTEKVWYELDKFEDVKKELDKEYRAILKESEEYDVQDSISKELVLKRMLLKKCIYGVDINPISVEITMLSLWINTFIFGTPLSFIEHHIKVGNALLGYTKDEFFDITKKKFESGFSLFKERIKEITTILEDSYQKIKSINDTTKEDIEKSKKIYKEYEESEDTDYLRIIFSLIKLYSLSFDKSLKIEFSDITAVISLIENILGNKTSSEDKEKIEKIRKVSSYYKFFHYGIEFPDIEEGFDIVIGNPPWEKTKFNESEFFSKHIPNYRKLSIKDQNKIKQEILSKDTHPLKIEYNEEKNSISTINNIYKSDFKDFTSGGDPNLFRYFIRFNLKLIKPGGNLTYLTPSALWSESSSRLLRKHIFTNYKLNYIYQFQNQKRFKDVVSLFKFVIFQLSNTKFSTSIFKAKFMIQSSDNILKAITRDLKDNKDDPYKGIELNIDQIKKLSPIQESIIEFKDNEEFSLINKMFSQFGVFSEEYIDFQKGVDPSINNRKSLLKEYNDENFIFLYSGANIHQFNSRFFICDDAKERAKLLWIDKEDLKKILTKDNQCQTERVFYRDIARNTDVRTMISTLSPKNCYCVNSMYINYEKTPISIYKKLFIISIFNSLAFDFLIRRFVNIHVQKSYLYQCPMPQPEEKEILSNSLYLNLAKNTSLLVAKNDPGNFKYLLYLEHFKFSKEEVDKILNLDTKDEFFKEKENENNFIVASLYSLTKEDFMVLLNDFEVLKNKKGEDYILSLIKGYENYLRINKLNSTIQS

SEQ ID NO: 235 - protein, 258 aa, Borrelia afzelii
LKKNKLNIVKLNIITAILTSICISCAPLDNVNPNKLKSHTNPRKLKKTKSHTNSKNLAENNQNLKNESQNPKYSNQNSQEKILLSKLEKIDKDLKDQKKQEDIQIANIDAQDDFLETFKLQQDEVFMHITKMILKRIIYSSLNYEKEKILLLKEILEKLDNNAQNRKIARTFLETSRDIQLLIEKIHSINIEDISKKEAEKLLENRERSLKAKQNFAKTLSATIDAYSKDFNNLKTNLKNLATHIKDKYYHISLYLTE

SEQ ID NO: 236 - protein, 352 aa, Borrelia afzelii
MKIKSKCLALGLLFGFISCDLFIRDEIKEKSLGLCDEESSILETGDKSVKKSLNKKGKDKVARKKVEGNAVKKDPFNHHVKRESVNNSNLSQKNVISEEEILKTKLLRERPETRKEEIQKQQDEHKRMLQGSLSFLSGESGELKDTIESNEIDFTIDSDLRLKSDLQAISGSNSISYTDEIEEEDYDQYSLEEDYYYDEETRLSNRYESYLEGVKYNVSSAIKTIVKIYDNYTLLSTKQTQMYSTRLDNLAKAKAREEVKKFTKEELEKDLKTLLNYIRVSARTATNFVYAREIYSKRKLDAIETEIKNLILKIKGQSDLYEAYKAIVRSILLMKDSLKIIEIVIDKNGVWY

SEQ ID NO: 237 - protein, 319 aa, Borrelia afzelii
MELFDENYYAKAVANIIGEVKDPIMYKWFLPDQIEDVDLQMGYQRTVKWDAFLNANPTTIANEVNTISTIGFSSEVVRLNYLKLQYKFRHLKQASEKFYTSDSYIGDINNNLLPFAQAYKLASSEIIKLINHFVLTGAVSIQKDGKNQKRLLPNMYGLLNMPHQIKEEVASGDKDKMDKIFEKIEAGLSKLELGDEFSTPMMVIVDPATSLKLVKPYSAAQGAAMSCEKWEDILIQTIKAINNREDVYIETSNLLKHQILVYPLNPALIKFKPSKYMLPTPNEQVDKDSTDIAHSYIDFVLGGLLATKNTILQVNIKQS

SEQ ID NO: 238 - protein, 144 aa, Borrelia afzelii
MKPALPNIASITEEQIYNEFIRLGMEQLIAQDLSKRYYHNELTYRDLENLEKQFGLKFDNLIYKIDTVEKTLQKDISNLNDKIDFVEKNLKQNLDEKLKIHEKFLLEKLNISNRLIIIITIIIAPIAISSIANIITSIITGFSK

SEQ ID NO: 239 - protein, 185 aa, Borrelia afzelii
MSDITKIKEEFDKKVAEIKALMKNPQQDSGLLSNSLEFRDKNLIYSNSGGVWTSSKDKIENYSVKGYPYKRGVKLSFSIDGTSELEVEAGGGDDLYGICTDIDEFSGMATVMPITNNFTGYLTFKKPGNDIKPGDKLHFNQHGELEKTTGTEKSINAIALSKVHKLTEELFIGLASVFGNRALKG

SEQ ID NO: 240 - protein, 353 aa, Borrelia afzelii
MGDKFTIKFKGVLDHAVTKKAIEQDITKMEKYLKPKKSSLGSTKDIVKNNLSDKKKELSKQSKFENLRERVEKYRLTQTKKLMKQGMGFEKARKEAFKRSLMSDRDKRRLEYKELAKESKARNKMIAASQGKGLVAKIAIGSALGNVIGNAMSKVGGGLLGFAKKAVEEKSKTNRTKLLNSAFFEKDERNAIVGIKGKGGILSGMKGFERDLEKEEFLNQASVFKGTLRDLGMLNLNNLKKAVEFSAALKSSGAMSGEDAVKAVNSLLSGEGDELFDLLKKSGVGDKYIEDAKKAWQSGAEVDLESRITMLVEMFKDFKSFGLTKKADTKEEIDSNLASAEQTLSNLTTTVLD

SEQ ID NO: 241 - protein, 370 aa, Borrelia afzelii
MNKKMRMFIICIFFTLIISCKNYASSEDLKNLEQNVKGKVKGFLDTKERIVSDDPTVYEIAEKLKEEELKGKKESKQEQEDKEELMQGDDPANIDLPSILQTNNQDSTPALEAAQQITSGGQQKEEEKGKEEKEQAKAEEVKVKEEQKGEQAKAKAEQEKKEKEERERKEKEKQQQEQQKKRQEEEKKKQEEQEKAKAEKERREKEERQRQEQEERQIKSKIETLTKKIDEINRDIDSIKYKSWFVENEKRLEVKATEVRDKVTGPIYDHFTNDANTAIYYTWNLEDEEDLELGKLLEKLSNTRNSLRTKLNENNATYTLEEPKLKENVKIEEIESDLDELKSELEKVKEYLKNESNFKEIKEYISSSDD

SEQ ID NO: 242 - protein, 185 aa, Borrelia afzelii
MNNLAYRTYNIESIKNEFLNIGFSEEAIDFVFLHNDNYSFEYLKEKIIDIEKTLRKDISNLDTKIDTVEKNLDTKIDTVEKNLQKDISNLDTKIDFVEKNLQKDLFILNTKIDNVKGEITNKIENEVKNLQKDISNLDTKIDNEVKNLRKDLNMGNRLIHFMILTAAILGPILNALFMKYLQFIK

SEQ ID NO: 243 - protein, 236 aa, Borrelia afzelii
MNKKMKMFIICAVFALLSSCKNYAISKDLESLEQSEQELKSPKQIEQEIKKEFNGLLNILEKKDISNLDEKDTKEIEKTIKDLKDQIEKTDAKKTSLKTYSEYEKTVKEIREKLKDKLKDKKELEDKLKELEDSLKKKKEERKKALGEAKKKFEGYKGQVGSTSGVTQGQQTGNQGKVGQQAFKDVKELGLSVSSSSKNGADTGDMSKGIIDDALKQINEELKNNGEEAVEEKKIK

SEQ ID NO: 244 - protein, 154 aa, Borrelia afzelii
MKIINVLFCLFLLILNSCNANDNDTLKNKNKLTESQQAENGEKHNSGQIELQQEIPKSPEELLKEKLSEDQKIHLDWLKTALTNAGEFDKFLQYDVSKIKTALDHIKTELNKCKGKQNAAQQENTFKQTVQGALSGGDIDKFPEQANSLCDILP

SEQ ID NO: 245 - protein, 189 aa, Borrelia afzelii
MKTLVGACIVTLAVLGCYLPDKQKQAVQTFFKNSQSSDIGSDEIVADEIVADGIFDNLKLYMTEHNLLVDIKKTIISLKDPNYRAVPPVRDYNEEYFNKFFLDLGSERSKELIKLFGKIKNEQNDDKFKREAYWLYSCIRDLYSSDIKYSGENGNEYIVDMPRRPTIDQQYLKVKGSNRTVCFKMIIVY

SEQ ID NO: 246 - protein, 111 aa, Borrelia afzelii
MQNNTIGLGLNLLSSLTNIAKTDTNIDHNYINTFSKVIDFFYKTYMNTLKSMETAESTKILEEIQDILKYNIEIIEAISNNKSNKIISSLKAKRNKIMREYINILKRGENA

SEQ ID NO: 247 - protein, 176 aa, Borrelia afzelii
MELVSTKNITEEQIYKEFLRLGMEQLIAQDLSKRYYHNKLTYRDLENLEKQFGLKFENLEFKIDTIEKNLNTKIDTVKSELNTKIDTVEKNLQKDIANLDAKIDNVEKNLKQNLDEKLKINNQFLLEKIEINNQLLSKNLDSSNRLITIMSIVLVPIAIAIIGPFVLSLINGFFKQ

SEQ ID NO: 248 - protein, 157 aa, Borrelia afzelii
MSNLAYNTLKIENIRLEFLNKGFSEETIDFILLQNDNYNFEVLKERMNSLEQQIINVENNFQKDIYSLDVKIDSVKNELNAKIDSVNAKIDNVKNELNAKIDSVNTKIDGVEKTLQKDISSLKNELNASNRTIQVMLIAGITLAPIIYSIFNKYFFN

SEQ ID NO: 249 - protein, 186 aa, Borrelia afzelii
LMSIKNKMIITKRVEIKENISKMESLEEIHKEEYLRLKDKLKTLTTDDIYNKIETAKILNTINQKKLYILDGYKNFYSFLAGFKIAKSQAYKYIKIVSGVEKGIIDYNFIASNGIEKTIKQLESSNIIKKSNQNPIKPLRFQLKRQDSYDFYKSNAKFTGFLLDKLFSDEKEMIKKIMKEYKALKG

SEQ ID NO: 250 - protein, 180 aa, Borrelia afzelii
LDIKVNKRDLSDNGNYIVADSALNHYNSLKEKLKINSKKEIYCKLETLKILKEIKDNEYYKLDGYKSFEAFSKDYRLARAQVYNYLKIANAIEDGIIQEEFLIKNGILETLIILRNKESKTIKKSKQNPIKPLRFQLKKQESYDFYKNHAKFTAFILEELLENQKDFLNKLLKKYKQLKG

SEQ ID NO: 251 - protein, 146 aa, Borrelia afzelii
MKNRFFFIYLSSSFVFLFSCNGFLTLESKERSSFTDKQRISILETIKNHYNGDSEKIARVDKYFDRLEDSQKDVFLQLFSAGFDYINSKESEPKESEPKESANRRANLDALKSNFESKLKQLNYTEEDFNKLVDDFNEFVDPKPTS

SEQ ID NO: 252 - protein, 130 aa, Borrelia afzelii
MEIGEKIRKSIFDNAKTFVGFKVKKNMEQLKSSVPGRLSNVTKIDLEETSLGIDLKVKVDSPLAEFLDSGKAYGNNSSSPSLAKIRNWAAYRGIESAVVPIWLSLKKRKPKTQYTNWTSDLVKESAKLLR

SEQ ID NO: 253 - protein, 358 aa, Borrelia afzelii
MVKKVVISSTSIMLSIFSLSCDLRKENAGNKIGSVISSGKDYWDNLGCKYLSGSEKSIFNAFPKSKKSQVFYSILKKENGKDAIQLLINWGIDFQTASSIAISIDKELVELKNSQIKLSDNDSYEVGNAGNYNLPYSSIDSDNNLLSADSSFYSNLDSNDNANTNYLNSQNYTYQEYTNKQAQEMQEIFKKYKIFKENAYKLSQTLNKSTSYAEELNTKLSEINTKENNKFILKADDIKDIIRLIARIKMTQYTDLSKKILDNNFSNIASDEESARYVLLYKNTNSPYLEVRKILGSILSKISSIVGGSKANVVDIEDSEKIKKAKEYAQGVLDILKSIDSGEAVEAVLNKAKQLEKK

SEQ ID NO: 254 - protein, 161 aa, Borrelia afzelii
MRILVGVCIIILALLGCYLPDKQEQAVQAFFDENSPQSSDMGSNEIVTEGIFANLKLYVAEHRLLIDIKETLISLKDPNYRNVPPVGKGYNEENFNKFFLDLGSERSKEFIKLFGRIKNDRNLFEKKVSLLFYCIEDNSSNGIDFRSINAIFDEEEKGVIK

SEQ ID NO: 255 - protein, 207 aa, Borrelia afzelii
LCYIKKYLIFILLLNLINCNLSNKNKNSDQDDAIISSLDSNQKQAFIFFKDLVKNKQYSKDFDQAVEGEEGPLESLKAQIEELKKKNEQYIELQNKLDQGFNCDYDDSKMKKLFDELGNDNVKKFLQQLHLVLKAINDGTHISFTSSNLTQTTKTLSEKQEIVLDVTKRNLYVQFYFYSNNLYREGYTSAGYFFNEVMEYHLAMDNY

SEQ ID NO: 256 - protein, 114 aa, Borrelia afzelii
MLETKVNENDVYNELVRLGMNKILASDLATRFYHNEITIKDLEIVKLELQGFVRDEVGTVKDEINIVKGKIKSLKTEFDSKLKLHNWMIGIVLASQGTIAGILVSLFFYIVNKL

SEQ ID NO: 257 - protein, 169 aa, Borrelia afzelii
MKKISLLIFLFLFVVSLSANIEENYTETKRAFSKEDFNLINKRLDNYDFKNEYEKSHVFSDAPRIRGDLRKIGIKEKSVFLDALEAIEYLIKIKISTDSIFLSEDMIRLIGSYPDSIFNYLIQLNSDKIDYAEKYGDNARNNFKKDYSEDKANTVKQILKQILADLPKD

SEQ ID NO: 258 - protein, 42 aa, Borrelia afzelii
AIKRPTIPQSHPQKNKKHKSKNGEISSLFPCIFGSRIFPINI

SEQ ID NO: 259 - protein, 28 aa, Borrelia afzelii
SRFCCYLSSIWSRLFSPFKTHPTSTCPS

SEQ ID NO: 260 - protein, 46 aa, Borrelia afzelii
NLGVIAMTKEKFSFAVPSERFITLKRFMSNKSSNPTETKSSNLAPN

SEQ ID NO: 261 - protein, 145 aa, Borrelia afzelii
LEIIGVSDIKDILSPNAPALKIAPATNGREMFTLSASSKAIGATATIVPIKLPVEKDKKRVIKKMPHTSKFNGTYLRPIFTTASTLPISLQTAEKAPDNINIKDIKITSCCAHPSINLFIFAKKDPLKKINVKTIAINIANMGGI

SEQ ID NO: 262 - protein, 85 aa, Borrelia afzelii
GSKILPTLLTRPYFLARYPSIKSVNSLKMIKNQIIPKNKYEKNIFSKKNKINMIKESIILANVILLGVIILIKLFNLSNLLISYF

SEQ ID NO: 263 - protein, 86 aa, Borrelia afzelii
RNCDLFANQRLISLIIGINSNSSIPKHCLRPSCCNLNKRRIINKILNKIKLAINLFIFNLFITNNTPRSRIKINKIFTPINQPFRI

SEQ ID NO: 264 - protein, 73 aa, Borrelia afzelii
GLLIFPSIAYPSILSLFSSKLFGTSNAFKDMFERLGSFTCQDCLELANRGKNFTSVSSFFTSSNELLQGIVAA

SEQ ID NO: 265 - protein, 89 aa, Borrelia afzelii
DFNKDSNSSLKILIPSRLKNSGVSGVITSHIARIILRSQSSKLGDKSKIANSNPNFSNSKQKSSIKYGKSCNSCCTSLLKVPLGTHGKI

SEQ ID NO: 266 - protein, 51 aa, Borrelia afzelii
FFILSACFFVAASASLSKLQLFKSEKTHIHKIILFFINILLNWLRLSLLLY

SEQ ID NO: 267 - protein, 63 aa, Borrelia afzelii
ISFSMILRRSSLSILIILRLGNTDSIASCTVFPLKFLFSNFRSKKLLLIANRTSSSTLKSPPG

SEQ ID NO: 268 - protein, 36 aa, Borrelia afzelii
ILAPQYRNIQFSSLHSFSKNLRLFISAVFKPPMKFI

SEQ ID NO: 269 - DNA, 1968 bp, Borrelia burgdorferi s.s.
atgaattttaattggtttttaatgttattcctttttaattttagtgttctattaggaagtgatactacagcattaggacattatcaaagggctaatgagtattatttatctaaaaggtattatgatgctattgatgagcttgttgaggctataaaaattaatcccaattattatgaagcttataaatttattgcatcaatttactattcccttaagatatatactcaagcacaatttttcatagagaaagcctctaaaatgtccaatgaagacactgaatataaaattctttatgcaaatatattgttaaaaaacgataaaattgatcaagcaaaaaaaatctattctgaggttttagtcaaacaaaggaataatattgatgctttggttggacttgcttcaatttttgaaaaaaatggattatttatagctgctgctaattattatttatctattcttgattatagtcaaaataattatagtgcttttgagcatcttattgacatttatcaaaggctaggaatgcatgacaagattagacatttgataaataaagtcagggtaaattttttatcttttccagattttcataaaagagtcgctgaattttatattagtattaataatttggggcttgctgaaaagtatgctttaaattatttggctttaattgaaagctcttacaaagattttggagttgttgatgcgtatcgattgcttgcgcttgtttatttgcatgaatttaaatatgaggatgcaatagaagcattgcagaaagctattttagttaataaagattctgatgagctttattatttattggggtattcttacttaagatttggagatattgaaaaggctattttaaatttagagcgagctaaaaatctcaaaaaagatttagaattttataatattgctcttgaggagagtttttttgcatctaattttagaaattttttgaaaaataattccaatgctagaatttctaagcattatgaaaatgaggggcttaaagcttttaaatctttaaatttaaacaaagcattgtttaatgcaaaaaatgctgttgatatttggcctgataatgatagtgctaggtttttgctttcaaaaatatacaagcttatgaatttagatattatggcatatgagcagcttttttatttagcaaaacaaagaaattctactgattctagaattttagatttttacgatgttgtgtcttttgatgttagaaagtctttattttataaatatggatacaaaagcattgctgattttaataagctttacgatgacagagtggtttataaaatggctatttttactcaaagtgagaataagttttttggggcaaatgatttgatattgagatacgctgaaagggtgcttgagcgtaatttaaatatggaaatagttaactataattttgattacaataaaaatagagactatctgattaataatttttctgaagggttttcttattcaagaaataataatttggatttatttttaatttttgattttaaggcagatattttgaaaaatacagctaccttggtagtgaatattttttcaggtaaaacagggattaagcttgtttctttctcttatgatgtgggaggtgttaattatttaagcaatgctttaaattctctttcaaaagattttcatgattatttgcccaaaaaaggaaagattcttcaaattaaaaatgacgatgctcttattaatcttggccaagtaaacggtgttgtaaaaggcgatgtttttttgattcttaaagaaggtgctttaaacagtgatactagagattctggttttattgtttacaaaaaatcagatattttaggcgagattttaattgaggatataagtgattatatttctagaggcattgtaaaatcttctacctttttaaaggattatgttcaagaaggagccactgtgcttataaaaaga

SEQ ID NO: 270 - DNA, 714 bp, Borrelia burgdorferi s.s.
atgaatctaatgttaataacttttaatgaatttaaaacaggaatttcactcaatgatactagggcagaacatcttgttaaaatcttaaaattaaaagataacgacaaatttaaatttggtattcttggagaaaaaaacatttaccactgcatttacaaaaaagataaaaaactatttttcaagaaaatctttaaagtaggtgaatctaataaacttaaaaaattatatgtgctaattggaatgataagaccaattgttgccaaaagaatcataaaagaacttgctagcattggaacatacaaaataattttttttaacactgagcttactgaaaaatcatatttaaattctaaaatctttaaaaacaatgattgcgaaaaacatttaatagccggagcaatgcaaggaaaaataacatacttaccaaaaataaaaattataaaaaatttgaaagaaagccttaaatatattcaacaagaaaattttgaaataaaaatattgcttgaaaaaaatagtgaaaaaaatttaattgatatagaacaaataaacaatgcggtcattattgtgggacctgaaagaggatttacagaaaaagaaaaacaattaatagcacaatataatttttccccttacagcatatccacaaacaccctgagaacagaaacagccacaattgctgcatctattattacagcatcaaaactaattaatatg

SEQ ID NO: 271 - DNA, 936 bp, Borrelia burgdorferi s.s.
atgaaaatattttttgtaagctcttcttctattgctttagaagttttcaaagagattgtaaagcattatgaagtggtgggagttttgactttgcctgatagacccaagggtagaggacaaaagttaagtcaaaatgtaataaagtcagaggctattgctaggaatattaaagttcttgatcctttgattcttgatgataatgtattaaatttagttagagatttgaatccagatttaatgttagttttttcttatggcaagatttttaaaaaagaatttttagatcttttcccaaagggatgtattaatgttcatccttctcttttacccaaatatagaggcgtttctccgattcaatctgcaattttaaatggtgattgtgttagcggtgttactattcagagtatggctttagaaatggatagtggcaatattttagtgcaaaaaaattttaaaataagatcttatgatacaagtcatgatatttcaaaacttgtatcaagccttagtccaagccttgttctagaagctttggaaaaaattagcaagggttttttgggaattcctcaaaaatcaagcgaagctactttttgttcttttttaaaaaaagaatctggatttatagattttaatttaagtgcatttgagattaaaaataaaattaatgcgtgcaatccttggccacttgtaagagttaggcttgattataacgacattatttttcatcgcgccgattttttggaggtagatttatataaggagagaaaaataggagaaattgttgattttaatcctgaaaaaggattatttgttaataccgggaaagggattcttttgcttttagaagttcaaagacctggaagaaaggttttggattttaagtccttttataatggaagtaggcagctaatagggcaagtgttttcttcaatagaa

SEQ ID NO: 272 - DNA, 1044 bp, Borrelia burgdorferi s.s.
atgccgaagacatttggaggaagctttgacaaaaatgaaattcaagctaaaatcgaaaaatatgaaaaagaaataaaccagaaaaatttttggaatgatcctaaaagagctcaaaaagtaattaaggctcaaagtattttaaaaaataaaattgatccgtgggaagagctaataaataaaataaaagacttaagcgatttgtgcgaaattgccgaaaatgaaaaagatactaacggcttggaaattgaatttaatacgcttgaaaaacaatacaaagatttactcacaatttcttactttaaagaagagcttgacgcaaacaatgcttttttaactattcattctggggctgggggcactgaagcatgtgactgggtcgcaatgctttacagaatgtattcaagatacgctgagagaaaaaaatacaaaacagaacttattgatttactcgaagcagaaggtggaataaaatctgttacaatagaaatcaaaggtgagtatgcttatgggctattgaaaagtgaagttggaatacatcgtcttataagaatttctccttttgatgctgctaaaaaaaggcatacctcttttgcatcagtatttgttgaccctgttattgatgacaaaatagaaataacaatcaaaccagaagacataagaattgatacatacagagcatcgggagccggaggacaacacgtcaataaaacatcctctgctgtaagaataactcacattgaaacaggaatagtaactcagtctcaaagcgacagaagccagcacaaaaacaaagacttggcaatgaaagttttaaaatcaagactttatgaatactataagagcaaagaagatgaaaaaaacaaatccaagcaagacacaaaaaaagaaatttcttggggcaaccaaataagatcttacgtatttcaaccttacaatttggtaaaagatcacagaacaaaatttgaaaattcaaacaccacttcggttatggacggaaacatagacaatttcatagaagagtatctaaaatggaaaagcttaaac

SEQ ID NO: 273 - DNA, 1026 bp, Borrelia burgdorferi s.s.
atgaaaaaaaaacaattaatacttcttctatttatgccacaaattatttatgcaaaaagctattttgcatctgatgtatttttcaataaataccaaaaattaaatgaaaaaccaaaaacggggttttatattgagtattattctgttgatgatactgaaaaactctacctatacaaagaaaataacttaataaaatacaaaacaattcaaatcatagaaaacacaaaaaaaattacatgttatgatacaaaagatacaaaaagaaaagaagagatttacgataatttaaataacaaaatacaagaaattgaatatgatagcaaaggaaaaactcttgaaacagcaaattacgtttatgaaaacgaaaacttaatatctaaaaatttaaaaacaataaaccaaaaaccaaaattaatatattattctaaagacgacaatggtaaattactaaaaataacaggatcaaatttccaaatttggaactatggaattaatggcgacataaaatctacatattttgacatcaaaaaagcaacaacaaaagttataaaatatgatgataaaaaaagaaattcaaacagtacaataattgttaataataaaataaaatccaaagaaaaaaaccaatatttagatgaagaaaaaatagtaaatacctttgaagaagagaatacaaaaatcatatctacctacaaggcaaacaacctaattaaagaagaaacatataaaaataatgaacttataaaagtaaatgattttcaatacaacgaatctgatatgataatttttcaaaacactaaagaaaaggataaagaccaatacaccaatactaaaattgaatacgaatataacaaagacaatcaattaaaaagcaaaaaaatttatgagaacgatataatttatctaaaaactgaataccacaatgacaatgaatatgaagaagaaatatactacaataaaaaacctgctcttagggtaaaacacaagaacggaaaagtcaccgaagaaaaaccaataggaacaaat

SEQ ID NO: 274 - DNA, 1248 bp, Borrelia burgdorferi s.s.
atgatactaaggctaccagaaattacaaaaattgcatatttaattttcaaaaattcaacaaataaaatagctttaataggttctggaatatcattaagtttagtaatgatcccattaattattgtttactacatgtctagcaacatcatgacttctactattaataaatatattgaaagtgaaggattttcaatgcaaatagaatacaacgaaacaaatagaacccattatttaaaagacagattaagcttattgaaaaaaaaacataattataaggatctaaattattttttcgagaaaagaacttatggaattattggaaacaataaaaaacaaggtgtattaataagagcaatagaaaataaattcatattagaaaacaaatcaataaaattaataaaaggtactaaaaacttaaaaaaggattctatactcatttcaaatcaaatcaaaaataaacttaatttaaatcttaatgaaaaaattgatattttgattccaaatacaaaaaatgataaaataatgcccagaataaaaaaatttaatatctcaggaataattgaaaccggattaaaagatattgataataatttggtattgatttcttttgaaaacgaaaatttaatgtcaaaaaaattttcaaaaagtataattggacttaaaacaaattccaattccataaaaaataatgagatcttaaaacagaatttagaaaccgaatttcaagaattccaaataaaaacattctatgaactttactcaaataaatacaataatctggatataagtaaaaaacttttaatattcattatggctttgattataatatttgcaagcatcaatatatcttcgtccctttcaatgcttatttttgaaaataaaaagaaaattgcaatactaaaatcaattggaatgaataatttaaatataaaaataatatttcttttgatatcgctcaccttaagcactatcttttgtggaattggaataataattggaaattatttaacacttaaaatatcttatttaataaactttattgacaatattttaaacttttttttaaaaatatttggagaagaaaattctgaaatattaaactcagaatattacgtatctgaatttcaaatacatttaagcctaagctttagcttaacacttcttggtctttatatgttaataaacattttaactacactgattccgcttaacattgtctcaaatctaaaagaaaaagaaatcttaaga

SEQ ID NO: 275 - DNA, 432 bp, Borrelia burgdorferi s.s.
atggatataggtttaataggggttaattcagctttaacaatctcagcaataggttctgcgttgggcatgggggcggcaggtagtgctgctattggagcatggaagagatgctatatgcaaggaaagccagcaccatttttattgatagtttttgtttcagcaccattgactcaaataatatatggatatattttgatgaacacattatatgaggtaatgatgcagacaaatccatggttgttgcttggagctggtattggtggtgggtttgctattgctgtttctggatttgctcaaggtaaagcggcagcaggtgcttgcgatgcattttctgagactgggaaaggatttgccacatatctattagttttaggattaatagaatccgttgctctttttgtaatggtattcttaatgatatttaagtttgtt

SEQ ID NO: 276 - DNA, 1653 bp, Borrelia burgdorferi s.s.
atgaatgaagttttatttgtaaagactgctggtaggaatttaaaagcagaagtaattcgtattaggggcaatgaagttgatgcacaggtttttgaattgacaaaagggatatctgttggagacctagttgaatttacagacaaacttttaacagttgaactcggaccagggcttttaactcaagtatatgatgggcttcaaaatcctttgcctgaattggctattcaatgtggattttttttagaaaggggagtatatttaaggcccttgaataaagataaaaagtggaattttaaaaaaacctccaaagttggagatatcgttattgcaggagattttttaggttttgtaattgagggaactgttcaccatcaaataatgattccattttataaaagggattcttataaaattgtggagattgtaagtgatggcgactattcgattgatgagcaaattgctgtaattgaagatgattctggtatgaggcataatattacaatgtcttttcattggcctgttaaagttcctattactaattataaggaacgccttattcctagtgaacctatgttgactcaaactagaattatagatacatttttcccagttgccaaaggtggaactttttgcattccgggtccttttggagcaggaaaaacggttcttcagcaggttacaagtcgaaatgctgatgttgatgtagtgattattgcagcttgtggtgagcgagcaggagaagtggtagaaactcttaaagaatttcccgaattaatggatccaaaaaccggcaaatctttaatggacaggacttgtattatttgtaatacatcttcaatgccagttgcagctagagaagcttctgtttatactgctattactattggtgagtattacaggcaaatgggccttgatattcttcttttggcagattcaacttcaagatgggctcaagcaatgagagaaatgtctggacgccttgaggaaattcctggcgaggaggcttttccggcatatcttgagtctgttattgcttccttttatgaaagggcaggtattgtagttcttaataatggggatattggatctgtaacagttggtggctctgtaagtcctgctggtggtaattttgaagagccagttactcaagcaactttaaaagttgtaggagcatttcacgggcttacaagagaaaggtctgatgctaggaaatttccagctattagtcctcttgaatcttggagtaaatataaaggcgttattgatcaaaaaaagactgaatatgcaagatcttttttggtgaaaggtaatgaaattaatcaaatgatgaaagttgttggagaagaaggcataagtaacgatgattttttaatttatttaaaatccgagctacttgattcgtgctatttgcagcaaaattcatttgattctattgatgctgctgttagttcagagcgtcaaaattatatgtttgatatagtttataacattcttaaaactaactttgagttttctgataaacttcaagcaagagattttataaatgagttaaggcaaaatcttttagacatgaatctttcttcttttaaggatcataagtttaataaattggagcatgctttgggtgaattgataaattttaaaaaggtaatt

SEQ ID NO: 277 - DNA, 1194 bp, Borrelia burgdorferi s.s.
gtgataaaaaaggtagctattattgatggacttagaacacccaatttcaagtttggaggttcttttaagggtttaaatattattgatgaatcttcaaaagttgttaaagctttgcttgaaagaaataagttatacaaagtggatgaggttattattggtaatgtaatatctgcgggacttggtcaaaatattgcaagacaaattgctttaaagtctgacttaggcgatactgtgcctgcatttagcgttaataaagtttgtggttctgggcttaaggccttggagcttgcatttaattctattgcccttggagacaatgatattgttttagctggaggagttgaagatttaaccaattctccttatttattacctagaaagattagatttgacggtcttaaatttggtaattttggaattgaagattcaatccaaaaagacgccttaatagattctctgaattttatttctatggggcttacggctgaaaatctttcagaaaaatatagaataacaagagaaatgcaagatgaatttgcatataattctcatgtaaaggcattaaaggcaagagagcttggatattttgaggatgaaatttatcccctgactgtttttgataagaagaccaactctagcgtaactatctcaagtgatgaggaaataagagataatttaactttaaataagctagcatctcttaatcctgtttttaaagaatcaggcacagtaactgccggaaattcttcaagtttaaatgatggtgcttgttttttaattttagcaagtgaggaaagagtaaaaagcttggggttaagtccattagcttatattggaggatttaaaagcgtggggcttgatccactttatatgggttttggagcttatatggctattgaaggcattattagtaaattaagtttaaatcctagcgaaatagatttgattgaggtaaatgaggcatttgcagctcaagcattaagcattgaaaaggccttgtttaaaaaatacaatataactagcgatattattaatgtaaatggtggtgctattgctttggggcatccatttgccgttagcggttcaagaattttattaacactttctcgctctatgaaaatgaagaataaaacaaaagggatagcatctgtttgtattggtggcggacaaggaatttctagttttttgtataga

SEQ ID NO: 278 - DNA, 1659 bp, Borrelia burgdorferi s.s.
gtgagaatggaaaatcaaaaagatttacaagaaaattatttgaaagtacttgaaagagtagaacttggaagtcgtgtttctgggacagttgttaacattatgaaggattatgttctagtagatattggttataaatcggaaggctttattaagattgaagaatttgaaaacgttccccaagttggtgatagacttgaagcaatcgttgtaagaataggtggagaattaggtcttattttaagtgttgaaaagcttaattctttaaattttcaagataaagtatatgaatatattcaaaataaaaaaataattaaaggcaaggtgctggttgagcttccaaatggttataagattcaaattaatgaaaatgtttctggctttatgcctttttatttaagctctaaatctaaggatgagaaattaaaaagagggtctgttgttgaattttatattcttgaagcaagcgaagcagacggtttgagacttattcttgatagacgcaccctagaaaaagaaagagatcttgctaagagaatagagctagttagttcttataatgaagaagatgtagttgatggtgtggttgagcgtattacagaatatggtgcgattgtaaaaattaaaaattttgttacaggaattttgcataaaagaaatattgcctttaatcaagttgaaaatgttgaagattttgttagagttggtgataagttaaagttgaaaattattaagataaatccacaaacaggcaaaatggaattgtctcttaaggccttaaaagcaaatccttgggattctgtagatgttaaatataaaattgatagcattgtaaaagggaaagttgtaaaaattttaccctttggggctgttattgaacttgacagcgaattgtcgggatttttacatataagtaatttttcttggataagagtagtaaaaagtcctcaagaattaataaaacttggccagattgtagaagttaagattttagagatagataaagaaaatcaaaaaatatccctaggcattaaacagatcaatgagaatccttgggagagattaactgagaaatatcctattggaagggttgttcaaggagttgttactaatattacaaaaacaggtgcttttgtaaatattgaagaaggtatagatgcttatgttagtaagtttgatatttcttggcttgaagagattgatcctgaagaatatttcaagataggcgatttagtgaatgggaaagtgcttgaggttgacaagagaaagagaaatgttagattaggaattaagcagctagaagagagcccctgggaagatttttctaaaagctataaaaaaggcgatactattgaggttgagattgtagagaaaaaatcaaaaggctttcaagtaagagtttataataaaataatgggatttattagtaaaattcaattgggggatacaaaagaatctagtttagaaactttcgaaaaattaaacgttggagataagcttaaagtggtaataacaagtattgattctaaagacaaatcagtgctgctctcttatagggagtatgaaaatcaaagatcaagagaagaaatttcttcttatttatttaagggcaatgatgaggaatcttacaagccatttgagaatttgctaaagagggatgaa

SEQ ID NO: 279 - DNA, 1887 bp, Borrelia burgdorferi s.s.
atgaccaaaagaatgcttaataacacttatcgaataaaaacaatattaacaatattcttggctataactttgttaactatttacaaatatttcacactaatggccttcaataacagcccagacaacacaatatctttaaagtcaaatgatattgccaaaagaggaacaatttatgatagaaatggcaaaccaatagcattctcttcaaaatcctactcaattggtacaaatcctcaaaaaatagaaaatattgtaagcacatctgaaactcttggtgcaatacttcaaattaattcaagaattttaaaggaaaagctttcctctaacaaagggtttttatatataaaaagaaaaataaaaagagaagaatcagatttaataaaaagaattcaagctgaaggcaggctttcaaacatcactttatatcctgattacacaagaatttatcccttcaggaataccacaagcaatattactggttttgtaggaacagataatcttggccttgagggcattgaattttccctaaatagcatattaggaaaagataaaaccaagcaacaatttttaaatgaggagccagaaacaaacaacatccacttaacaatagacatggatatacaacaaggtgttagcaaaatagctaaaaaatactttaaagaaaataatcctgaaagtttaattaccttggtaatgaactcccaaaatggagaaatattatccatggttcaatttcctcaatatgatgcaaacttttattctaaatatcctgaagaaatccgaaaaaacctttcttcatctctaacctatgagcccggaagcattaataaaatttttacagttgcaataatattagaaagtggaaaattaaatttagaagaaaaatttttagacaatggaatatatcaaaaacaatttccatcaggagaaaaaattacaatcaaaacattaaatcccccctataaacatatcgactctacagagattttaatttattcatcaaatgttggaatagcttacattactgaaaaagttagcaatgaatacttttataaaaaacttttagattttggctttggggaaaaagttggagttccatttcccggagaaacaaaaggactgctaaatcattattcaaaatggtcaggacgaagtaaagctacaattggatttggacaagaaataggagtgtcagcggttcaaatattacaagctgcaagcatactaagcaataatggaataatgctaaaacctagaataataaaaaaaataagcaacgataaaggagaaaatattaaagaatttgataaagaagaaataagaaaagtaatatccaaaaattcagcacaaaaagttttaaaaatgatgagagaagttgtaaataaaggtggaattccaaatcttaaaattaaaaatcttgacatttctgcaaaaagtggaacatctcaagctattgatagaaaaacgggaaaatactcagaagaagactatacatcttctatattggcaatataccccacagaacaaccaaaatatattatttacattgtatacagatacccaaaaaaaataatatacggaacaagaatagcagccccaatggcaaaagaaataatagaatttattgagcaccaacaaaatacaatagcatataaaaaaattaaaatgccatcaaaaatcaagatccctaaagctgaaactaattacaaaaacaaaacatacttaccaaattttatcaacctttctaaaagagaagcaatagacatactaaaatactataaaaatactatgaaaataaaaataaatggcgatggatttgtttacaagcaaagtatatcccccaatacaaaattagaagatataacagagcttgaactgtatttaaaa

SEQ ID NO: 280 - DNA, 1008 bp, Borrelia burgdorferi s.s.
atgattatcaatcataatacatcagctattaatgcttcaagaaataatggcattaacgctgctaatcttagtaaaactcaagaaaagctttctagtgggtacagaattaatcgagcttctgatgatgctgctggcatgggagtttctggtaagattaatgctcaaataagaggtttgtcacaagcttctagaaatacttcaaaggctattaattttattcagacaacagaagggaatttaaatgaagtagaaaaagtcttagtaagaatgaaggaattggcagttcaatcaggtaacggcacatattcagatgcagacagaggttctatacaaattgaaatagagcaacttacagacgaaattaatagaattgctgatcaagctcaatataaccaaatgcacatgttatcaaacaaatctgcttctcaaaatgtaagaacagctgaagagcttggaatgcagcctgcaaaaattaacacaccagcatcactttcagggtctcaagcgtcttggactttaagagttcatgttggagcaaaccaagatgaagctattgctgtaaatatttatgcagctaatgttgcaaatcttttctctggtgagggagctcaaactgctcaggctgcaccggttcaagagggtgttcaacaggaaggagctcaacagccagcacctgctacagcaccttctcaaggcggagttaattctcctgttaatgttacaactacagttgatgctaatacatcacttgctaaaattgaaaatgctattagaatgataagtgatcaaagggcaaatttaggtgctttccaaaatagacttgaatctataaagaatagtactgagtatgcaattgaaaatctaaaagcatcttatgctcaaataaaagatgctacaatgacagatgaggttgtagcagcaacaactaatagtattttaacacaatctgcaatggcaatgattgcgcaggctaatcaagttccccaatatgttttgtcattgcttaga

SEQ ID NO: 281 - DNA, 1995 bp, Borrelia burgdorferi s.s.
ttggcatcaggattttttgttcctggacttgagagtaagtacaatactaaagaaattcgtgaatccatgcttaagtccgataaggctaaaattgattcttcttttaagaaacttgaatctttagagcaagagaaaagtgcctggcagttaattaatagaaaaatctctactttaaattctcttgcaaaagaacttacatcactcaacagtccttttaatctaatgtcaggaaattctagtaatagcgaagttttaactttgtctactagatatggatctaagaatgagactcataaattaattgttgatcaaatagcgtcagctgatgtgtttttgtcttcaaattttgatcctaaaaaagttacaatcccagagggagattatatatttttagttggcaagaaagaaattaatgtaaaaagtaatggcaacattgatttacttgtgaaggatattaataacaagggaaagggctttttatctgcaaaaatagtgaaaagtgataaaaatggaaatagtcgttttgttttgcaatccttaaaggagggcaaagaaaacaagcttgttatcaaaggggagggattgtcttttgctaagcaaattggaattttaagtgagcttaaaaccaattttaatcctaatctttcagatattgttgtaaatcaatctagcagcaacaataaacttgcttttgagaacaatggtcttgttttaaatccgctttcagaagtatcaattgaaattcctgaagatattgaaattacatctaggagtaagattaaatttgaagttaagtattttgatacaggcttggaagagcctgatagtaagattatttttaatcccggaggggctacatttaaggatgcaaaagttgagagtgaagatagtgtagttgatcttggatctgatttaaaaacccctttggaaaaaaaatatattcaaatgaatatggttaaaatatgtagcaaggaaggttctttggagcttcctttaataaatatttcaaataattttgaagaagttgaagttgatgttggagctctttctaatttggaagaaataaatattgaaaataaagcaaataataaagtaattgtgattagcaatgttgaaatttttgatccaaaaaatagagatggtcatttgccaataaatgctaaaagttttgctgaaaatgcaaaaattaaatttgatggagtagatgttgagagagattcaaatgttataaatgatttggttccaaatgtgacattaagtttaaaaaaaccctcaagtgatatggttgaggctaaaattgaacctgattatgaggggattaagagggttcttttagattttattggtgcttataatgaggttcttgctgagattaatattgtaagctctaatgaagatcagcctaataatcaaaagtctaatatagttgaagagctaacttatcttagtgattctcaaaaagaagaggcttataaaaatttaggtattctaaggtctgaatttttattaaaaaatcttaagtccaagctagagtcaataatttttaagccttatgttactagtgatcctaatttttcaataattaatcagatgggagtttttacaaattccatttcttcttctggtggactttctagatatttaagacttgatgagaaaaagtttgatgaatcaattcgtaataatattgataatgttagagagctttttttatatgatcttaatggtgacagagtgtatgataatggaattgctaaaatgctaggagattgtctgtcgcctcttgtggcttccggaggagttatttataataaaataaagaattacgacttgaaaatttttaatcaaaaaaataaagttgaagattataaaaagaagtacgaagatagagagagaaaagtggaaggtgaacttaataccttggattttaccgttaagcgcatgaaagatcaagaaaatacattaaaggcttttgattttaatcaaagaaataaa

SEQ ID NO: 282 - DNA, 1203 bp, Borrelia burgdorferi s.s.
atgccaaatttttgcttatttaactcaaaatccgttttaactggaaatgataaaatagataactcagcggttctaattaaagataataaaatttttgatattgtaacgtctgacagacttaaaaaaatggatctcgaagaataccaaatgattgacacaaaaggcaattatataactcccggactttacgacaatcatattcatggatttcacggtcatgggacagaccagtgttcaacagaatcgatacttaaaatgtcagaacatttagcacaatacggtgtagtaggatttttaccaaccctttacccaagaccaatagatgaaatgattaaaacaataaaagcttgcatagcagcaattggtaaagaaaagggagctaaaattttgggacttcaccttgaaggaccatttttctctcctgaaaaaaaaggagctcatccagtttcttatcttcatgaacctagtattgaagttatgcaaaaactaatagatgcagctggtggagtatttacaggatcaaacggcaaaagaaaaacacatataagcacaatgactgttgctcctgagcttaagggtatgagagagcttgcaatattttgccttgaaaacaacataaaccttcaagcgggacacacaaatgcaacatatgaaaacatgatagaaggatttcaagttggaatacttcatacaacccattttttcaacgcaatgtcaaaacttgaccacagaaatccaaatgcaataggagcggtgttaatacacggcgatgtttcttgcgaaattattgcagatggccaccatatacacccaaaattaattttaatgcttagaaagcttaaagatataagtaaaatagtccttgtaactgacggacttactccgaattgtcaaacttgtggaaaactaattgcaaacggagacgaagtttatattgcagaagatggattattccatagcgtgaaaagcaacacaatagctggatcaacactcacaatgatacaaggtcttaaaaatttaatagaatttggtttcagcttaagcgatgctgttcaagcaagctcttacaatccaacaagaattctcaatattgataaaaagggcttaatatgtcatggatatgatgcaaacctcaatgtcctagataaagattttaatctaaagttaacaatgatagaatctaaaataatttttaacaatctc

SEQ ID NO: 283 - DNA, 1881 bp, Borrelia burgdorferi s.s.
gtggattcaacattttcaggaatagaaattggcaaaagaagtttatttgcacataaagatgctatgaatacagttgggcacaatttatccaatgctacaaagcctggatattcaaggcaaagagtaacaatgaaaaccgaaattcctctttatgctccacaattaaacagagccaaaaaacaaggacaattgggacaggggattgttgttcaatctatagacagagtaaaagatgaactacttaacacaagaatcattgaagaatcgcaccgactaggatactggacttcacaagacaagtttatatcaatattagaagatgtttataacgaacctgaggatcaatcaataagaaaaagattaaatgatttttgggaaagttggcacgatctagcaaatcaaccacaaggtttagcagaaagaaaaataattctagaaagaggcaaatctttttgtgaaggaataagaaatagattccattcgcttgaaagaatttacataatggcaaacgatgaaataaaaattacaacggatgaggcaaacaattacattagaaacattgcaaatcttaataaacaaatttcaaaatctcaagcaatgaaagacaatccaaatgacttaatggatgcaagagacttaatggttgaaaaattaggcaatataataagtgtatcaattgaaaacaaacaagatcccaatgaatttttaatccacgcagaaggaagacatcttgtacaaggttcaattgcaaatgaattcaaactagaagctacaaacgggcccaccagaactagatggaacattttatgggcaaataatgacaaagcttaccttaaaacgggaaagctgggatctttgcttaacataagagatgaagagattaaaaacgaaatcaatgaactaaataatatagctgccaacattatagaaattgttaatgaaatacatgaagcaggacgtggaatggataaaaaaaatggaagaagttttttttctcaagaactaaaactaactgatgatcgaggtagatatgatactaacggaaatggtcagtttgattccgttcatattttcaaaattaacagcacaaatgaaatatttccagaagaaaaattgggattttacggaactcttaaatttgaagctacaaatagtaatgaaattgtagaaataccctacaatgctccagatacagttcaagatgtaataaatagaataaataattccaacgcacaagttacagcaagaattaactcagaaggcaagcttgaaatcaaagcagttaaagaacaagaagatgagaatataacatttaaaatcaaacatatagaagattctggatcatttctaacaaaatatacaggaatattaaatgcatctggacctgagggagcttatgattataaaaatattgacacaacagacaaattggcgcctaaatcgacttattcaatctctcctctaaaaaatcctgcagcatggataaaagttgcagacataatagactcagatccttcaaaaatagcatcgggaattaaaaatccaacaaatgaaatatctattggagataaccaagcagcactaagaatctcctcttttggaaattctcagattatgattggcaaaaatttaacattaaatgattactttgcaaatacagcatcaaatatagcaataaaaggacaaatttcagaaatcacaaaagaaagccaatctcaaatattaaaagatttaacagatctaagaatgtctatttctggagtaaacaaagatgaagaacttgcaaacatgatcgaatttcaacaagcatttattgcagcaagtaaatttatcactgtttctgttgaactaatagacacagtaataaataaaatgggagta

SEQ ID NO: 284 - DNA, 738 bp, Borrelia burgdorferi s.s.
atgtctggccctaaaaaacttgctataatagcgctcttagtaatttcaatacaaggatgcaaagaatcttctattattgaaaaacaatttaattatgcaataattttttcagatgcaactgaatatttttttgaaattcaaacaactccattcataaaaaacgaaatactatttataaatgacaaaaatttagaaattataaaagacaagcttaaaacaacaaaaaaaatactattaactcataaatcaaataatgaaattctaaataacgaaattctaaaagagaaaattttttatctatcaaaaataaaattttctctaaaaaaatctattgactttctgcttaacgaaaaatcaatagatttgcaaaaaacattactatttagagacaaatctctaaataacgaagaccttgaatacttggaaaaaaaaggcaaagaaaaaaatgtcaatattactctaataaacgaaaaaaacatatcctatattcaaacattcattacttctcaaataaaaacaataatattattctctttaagagataataatattattttaaaaaagatactaaattcgcctttttctaaaaatataaaatttgtattaattggcaatacaagaaaagacttaaaaattattaagctaaaatatataatcacccttaaagagcctgatttgataaaaatagcaaaagatgttgaaaaagattttcaatatgaatttaacatttataaacaa

SEQ ID NO: 285 - DNA, 1068 bp, Borrelia burgdorferi s.s.
atgttgatatttggtggcgtttcttttgagcatgaaatttcttgcaaatctgcttatagtatttatttagcccttttggatctaaataaatacaatatttatcctgtttatattgataagtgtacaggtgtttggtatttattagattctgtttctgatcctcccaagcccattaatacagatgttttacctattgttagtttattgccaggttttggaattttttcaaacaataaaaatcttgaaattgatgttgtttttcccgttgttcacggaagaaccggtgaagatggcgctattcaaggggttttaaaggttatggacattccttgtgttggtgctggtattatagggagcgccatttctagtaataagtatttttgcaaacttttgcttaaaagttttgatatccctttggttccttttattggatttagacagcatgattattttttagacaaagaagaaataaaaagaaatgtaaaggaggttttaggctatcctgttattgttaagcccgcagtattagggtcttcaattggaataaatgtagcttacagcgaaaatcagattgaatcttttattaaagaagctttaaagtatgaccttactattgtaatagagaagtttattgaggctagagaaatcgaatgttctattattgggaatgaaaagatgaaaatattttctcctggggaagttgttgtgcaagattttatattttatgattatgatgctaaatattctgttattcctggaaattctattatttttaatattcctgcacatcttgagacaaatcagttattaagcattaaagaatatgcttttcttacttataagaatctagaactcagaggtatggcaagagttgatttttttgttgaaaaaaaatcaggaactatttatcttaatgaaataaacactattccaggatttaccgatatatctatgtttgctaaaatgtgcagcaatgatggtcttcagtttaaagacctggtggataatttaattgattatgcttttcaaagttacattaataggaaaaaaaggattgattttgaaaat

SEQ ID NO: 286 - DNA, 3357 bp, Borrelia burgdorferi s.s.
atgaataaaaaacatacaaatttttcggtattattgcttttaattttcttacttatcttatcatttgggggctttggttactatatatatcaaagcaaattaaatgacaaaaatcgagaaataatgctaaacgaagttaaaaatagcgtaatagatcgaaactataaaaaagcatattctgttgcaaaacttctgcaagacaaatacccccaaaatgaagacattgcaatgcttacaaatacactagcagaaattgccaacagtagtccttttgaatcaaaagacttgcaaagagattctgctaatcaaatcttagacaagatcaaaggtcaagacaatacaaaaacaaatgtaaacgaaaattttgatatagcatttaataatagatacattaaagacagcacaataacagaaaactactctgacagaaacgatgatgttggcattgaagatgaagacatatctgaatttaaaaaaagcaaaatcccagaaaaaataaaaccaaatacaaacccaaaagaagaagaccaaataatacaatctccaaatccgaaattaagtgttaatgaccaaaaaaatttatttaatttggaaaaactaaaaaaaaatttaagtggaaaatcaaatagtgaaaatattttaaacgattctcaaaaaatagaaaatgataagcaaaacacaaatttatccaaagaaaaaaattcggagaatattttaaaaactccggacaacagtaaatattcaaacaataacaatactacatctttaaaaaaaatttcttcaaattcccaaaaagaaagtgagctttctccacccagtcaaacaataatagggaaaatttataggccatatagctacttgataaaaaaagagctctatgaaatattagacgatattaataccggaagagtcacacttggaaaaaacagattaaaagaattaattaaaaaaggtctaagcaacaaatttcaaaaagtaaatgaattgattgaaaattcaaaaaataaagaagcttcaaatttactattaaccttaataaaaaaagatattgaaccaaatctcattaatataccaaaagatccttacaaaaaagaaatttttcaattagataaagaagacaaaaagcctcagtacctagaggaccttaaatctaaagttcattcaataaaacccattgatcttgaaaacacaaaatcacgccaacaagccattaaggatctaaacgaattcttgaaaaacaatcccaatgacgctcaggcctctaaaactttagctcaagctaataaaatacaacacctagaggaccttaaatctaaggttcattcaataaaacccattgatcttgaaaacacaaaatcacgccaacaagccattaaggatctaaacgaattcttgaaaaacaatcccaatgacgctcaggcctctaaaactttagctcaagctaataaaatacaacacctagaggaccttaaatctaaggttcattcaataaaacccattgatcttgaaaacacaaaatcacgccaacaagccattaaggatctaaacgaattcttaaaaaacaatcccaatgacgcccaggcctctaaaactttagctcaagctaataaaatacaacacctggaggaccttaaatctaaggttcattcaataaaacccattgatcttgaaaacacaaaatcacgccaacaagccattaaggatctaaacgaattcttaaaaaacaatcccaatgacgcccaggcctctaaaactttagctcaagctaataaaatacaacacctggaggaccttaaatctaaggttcattcaataaaacccattgatcttgaaaacacaaaatcacgccaacaagccattaaggatctaaacgaattcttaaaaaacaatcccaatgacgcccaggcctctaaaactttagctcaagctaataaaatacaacacctggaggaccttaaatctaaggttcattcaataaaacccattgatcttgaaaacacaaaatcacgccaacaagccattaaggatctaaacgaattcttaaaaaacaatcccaatgacgcccaggcctctaaaactttagctcaagctaataaaatacaacacctggaggaccttaaatctaaggttcattcaataaaacccattgatcttgaaaacacaaaatcacgccaacaagccattaaggatctaaacgaattcttgaaaaacaatcccaatgacgcccaggcctctaaaactttagctcaagcttatgaaaacaatggagatttgctaaaagcagaaaatgcatacgaaaaaattatcaaactcacaaatacccaagaagatcactataaacttggaatcattagattcaagcttaaaaagtatgaacactcaatagaatcatttgatcaaacaataaaactcgacccaaaacataaaaaagcacttcataacaaaggaatagctttaatgatgctaaataaaaacaaaaaagcaatagaatcttttgagaaagcaatacaaattgataaaaattatggcaccgcctactaccaaaaaggaatagcagaagaaaaaaatggcgatatgcaacaagcatttgcaagctttaaaaatgcctacaatctcgacaaaaaccccaattatgcattaaaagcaggaatagtatcaaataacttgggcaacttcaaacaaagtgaagagtatttaaatttttttaatgccaatgcaaaaaaacctaacgaaattgctatttacaacctatcaatagcaaaatttgaaaacaataaacttgaagaatctcttgaaacaataaacaaagccatagatttaaatccagaaaaaagtgaatatttatatttaaaagcatctataaatcttaaaaaagaaaattaccaaaatgctatatcactttacagcttagtaattgaaaaaaaccctgaaaatacttcagcctatataaacctggcaaaagcatatgaaaaatcaggaaataaaagtcaagcaatctcaactcttgaaaagataataaacaaaaataataaattagccttaaacaatcttgggatactttacaaaaaagaaaaaaattatcaaaaagcaattgaaatttttgaaaaagcaataatcaattcagatattgaagcaaaatataatcttgcaaccactctaattgaaattaatgataacacaagagctaaagaccttctaagagaatatacaaaattaaaaccaaacaatccagaggccttacatgcactaggaataatagaatataatgaaaataacaatgatcaaacactaagagaacttataaaaaaatttccaaattacaaaaaaaatgaaaatattaaaaaaataataggaata

SEQ ID NO: 287 - DNA, 840 bp, Borrelia burgdorferi s.s.
ttgatgaaaaaagttattatcttaatttttatgctatcaacaagtttattatacaactgtaaaaatcaagacaatgaaaaaattgtatcaattggaggatctacaactgtaagcccaatactagacgaaatgattttaagatataataaaataaacaataatactaaagtaacatacgatgcacaaggaagtagtgttggcataaacgggctatttaacaaaatatataaaatagcaatatcatcaagagatttaacaaaagaagaaattgaacaaggggcaaaagaaactgtatttgcttatgatgctttaattttcattacaagccctgaaataaaaattacaaatattacagaagaaaatctagctaaaatactaaatggagaaattcaaaattggaaacaagtgggaggtcctgatgctaaaatcaactttatcaatcgagactcttcttctggttcttattcgtctataaaagacctacttcttaataaaatattcaaaactcacgaagaagctcaatttagacaagacggaatagtggtaaaatctaatggagaggtaattgaaaaaacaagccttactccccactcaataggatatataggtcttggatacgcaaaaaattcaatagaaaagggtttgaatattctttctgttaacagcacatatcctacaaaagaaacaataaatagcaataaatacaccattaaaagaaatttaataatagttacaaataacaaatacgaggataaaagcgtaactcaatttattgatttcatgacaagctcaactggacaagatattgttgaagaacaaggctttttagggataaaaaca

SEQ ID NO: 288 - DNA, 1224 bp, Borrelia burgdorferi s.s.
atgaaagttatgcaggatcctaggctttccaagtataaaaatgctaaaaatttaagcaaaaaaaccgttgaagaaattgatactttaagtttaaataaaaatttttccgattcagagattcaaggctctatgcttagatcttggataagccttattaaaggaaataaaaataaaacacctgtcgagcctaaatccaacaatattaatgagttaaagccagggtttattcgcaaagagagtaaggtcacaaagattgcaaaatattttttggctattggacttgaaaaatctgctaagattatgtctgagcttgatgattcggatataatcttaattaccagagaaatttcaaagattagctatattgctccagaagaaaaagagcatattattaaagaatttgaagagttactaagaaatcaaaaaaggtatgttaaggttgatgataactttgcttatgagttattaaataaaacgttaggaaaatctaaggcaaaatcaatttataaaaaagttactggtaatgatatttttattccttttgattatttgtctcaaattgagcatgaacaactttgggcattaattaaggatgagaatattaaaacgcttgttatattatataattatttaaataaagatcaaaaaaaatatgttttttcaatgctagaagaagaagatagaagaaaatttgtaaaagatcttgtcaaaccaaggcaattgagcatggagacaatagaggcaatttcaaataagcttaaggatagatttaagatgcaggggaatcttaagacagataaacttgatggatctaagatacttgttgatattttaagctatatggattttaatgaagagaaaaatttgcttaataatattaatatgcgggatttaaatcctgttgtggacagtgaaattcgagaaaaaatatttgatatcaatgtaatattgagaataatggataatgaccttcataatattttaagagagtttacagacaaagagattgcaattattattaaggataaagctgatgaggttagagataaaatgctttcaaatgtttcaaaaaggcgcaaagaaatcattttagacgaagaagcttttttaggaaaaataagtaaaaaagatttaaaaactatgacaacagcttttgttaattatattaaaaatttaactttaaaaggcgatttaataatatatagaaaaaatgaggaatttatt

SEQ ID NO: 289 - DNA, 2004 bp, Borrelia burgdorferi s.s.
atgttaatttttggttttattggtttgttttttttaaatatttttagtttgcatgcccaaggaatagttactaataaagatgctcaagaagagtttaaatgggctcttaattcttataataatggaatttacgatgatgctcttttatcttttaaaaaaattttaagctttgatcctaataatcttgattatcatttttggactggcaatgtttattatagactgggttatgttgaagaagctttaatggaatggagaaatttaaaagatcaaggctataaggttccctatcttagacatttgatttctactattgagcaaaggagaggtattttttcaaattatgaacttaattttaaaaaacttgtaaaagttgcttctcttgataattctatttataaaaggccacatgggtaccagattacatctttaagggctgataagtacggcggatattacgctgctaactttgtaggcaatgaaatattgtattttgatgttaataacaatgttaatgctttagttaaagatggctttagttatttaaaatcaccttatgatgttattgaagctaataatctgctttatgtgactctttattcaagtgatgaaattggtgtttatgacaaagttcttggagttaaaaggaaatctattgggaataaaggcacaaaagatggcgaattgcttgctcctcagtatatggctattgataagagaaactatatttatgtaagtgagtggggaaataaaagagtaagtaaatttggacttgaaggtgattttattttgcattttggttctagaacttcaggctataagggccttttaggtcccacaggcgttacttatttgaatgaaaacatttatgttgcagattctctgagaaataccattgaagtttttgatactagtggtaatcatttatattcagtttttacttctattgagggaatagaggggcttagcagtgattttgtaggtaataatgttatagtatcctcaaaagatggtgtttataaatatagcattgctaaaaagacaattacaaaaattttaaaagcagataaaatgaattctaaaatttcttcatctattttggatgccaataatcagatgattgtctcagattttaataatgccaaggtttcagtttacaagagtgatgcaagcctttatgatagtttaaatgttgatgttagaagaataattaggcttggagggcctaaaatttacgttgagcttaatgttagcagtaaaagcggattaccagttgttgggcttaaaagtgaaaatttttcaatttcaaatgaaaattattacattgtcaatcccaaggtggcatataatgtaaatgcttcaaaagacattaatatagcagttgtttttgataaatcttcttatatgaaaaaatatgatacagatcaaattgtagggttaaatgccctaatggagttgtcaaaaaataaaaactttagttttataaatgcaacaagtgtgcccattatagataatattgaaagcttaacaaatagcattagaaatacaagttctcttggtccttatagtacagatgctgtaaaaacagacgttagtttgaagttggcaggttctgggcttatgtcaaaaagctcaagaagagcagtagtttattttagtggtggtattttaaatcgtaaagcttttgaaaagtactctttagatacaatagtaagctattataaaaataatgatataaggttttacttaatactatttggtaatgatcctattaatagtaagcttcagtatttagttaatgaaacaggcggtgctgtaattcctttttcatcttatgaaggtgtatctaaagtttatgatttaattttagaacaaaaaacgggcacttatttgttggaatattattatccaggccctcaagaacctaataaatattttaatttatctgttgaagcaaatataaatcaacagacaggaagaggggagtttgcatattttattaat

SEQ ID NO: 290 - DNA, 786 bp, Borrelia burgdorferi s.s.
gtgttaatggaggttcttatgagaagattatttcttctatatattttatgttcttttgtttttttgaatttatttgctcaaggtagttcttcttatattgataagcaaaaagagcttgctattttttattatgaggttggtcaaagatatataaacgttggtaaaattaaaaaaggaaagctttttcaagcaaaagctttaaagatttatccagatttgaaaaaggggtttgatatcaagcttgcagttaaagagcttgatgctaggattaaagatgacaatcccaaggttgttatgcttgaggatattaagcttgaggagatacctggaatagtgcacgaaaaaatagaaatcaatgattttacaaatgctcctaaaatagaatatattgctcaaagagagagaagcaaaaatcaagataaaattattaagtttcaatttggaaagtttgcaagagctttaatttctaggaactttgatttgtttgattcagttattgcggataaagttaacgttatgggtcaatttgaatcaaaaaatgattttatatcaactttatcaagtgcttcatctaaggccgatgctgatgagttagagtatttatcagttgatgattattacgatttaaagtctttaaaaatttcaaaatccaacgatacttcttttgctgttaatgttaatgccaaaaaaaatgatgttactaaaaattttccattttggaaagaacgtcaaactttaatttttactacagaggatgataataattggtttttgtcttccataaat

SEQ ID NO: 291 - DNA, 1326 bp, Borrelia burgdorferi s.s.
atgatgaggtctttatattctggtgtttctgggcttcagaatcatcaaacaagaatggatgttgttggtaacaatatcgccaatgtaaatacaattggctttaaaaagggaagagtaaattttcaagatatgatatcgcaatctatttctggagcttctcgccctactgatgctcgtggtgggactaatcccaagcaagttggattaggcatgaatgttgcctcaattgacactattcacactcaaggagcttttcaaagcactcaaaaagcatctgatcttggagttagtggcaacggattttttattttaaaagaaggtaaaaatttgttttatacaagagccggtgcttttgacgtggactctgatcgacatcttgtaaatcctgcaaatggaatgcgaattcaaggttggatggcaagagatttagaaggtgaaaaggttataaatacagcttctgatattgaggatctgattattccgattggagataaagagggagcaaagtctacgaaaaatgttacttttgcttgtaatcttgataagagattgcccttaattcaagaaggtgcgaatcctgcagatattgcacgcggaacttgggttgtcaataaatcattgtatgacagttttggaaatgttagtgttcttgagcttagagttgtaaaagatttaaatacgcctaatttatggaatgcaacagtattaataaatggtgagcaaaattcaaattttacacttgggtttgacaatgaaggagcattggcgtctttaaatggtcaaccagggcaaaaaggagatattcttcaaattcctataacatttaatgttttgggtgcaaatgtaggtgaagttggtgagcagcaaactgtaaatttgaaattgggaacagttggaagttacactgattcaattactcagtttgctgattctagtagcacaaaggctattattcaagatggatatggcatgggatatatggaaaattatgaaattgatcaaaatggtgttatagttggcatttattcaaatggcataagacgagatcttggcaagattgctcttgcttcttttatgaatcccggaggacttgcaaaatcaggcgatactaattttgtagaaacaagcaattcaggtcaagttagaataggcgaaactggacttgctggacttggtgatattagatctggtgttttagaaatggccaatgttgatcttgcagagcaatttacagatatgatagtgacccaaagaggatttcaggcaaatgccaaaaccattaccacttctgatcaattattacaagaacttgtaagattgaaaaat

SEQ ID NO: 292 - DNA, 1365 bp, Borrelia burgdorferi s.s.
ttgtgcttgaggagattgaaaatgaataaattagaagagcactatatagttcccaaagatgtagttgcagaacttgataaatatataataggtcaagacgaagctaaaaaattagtatcaattgctcttgttaatagatatataaggtctaggcttccaaaagaaataaaagatgaggtaatgcctaaaaacattattatgattggatcaactggcattgggaagaccgagattgcaagaagactttctaaattaattaaagctccttttattaaagttgaggctacaaaatatactgaggttggttatgttggtcgtgatgttgaatctatggttagagatttaatgagcattgcagttaatatggtaaaagaagagatgtatagtactgtaagagatgatgctttagtaagaacagaggagagaatagttgatagtctttttaagggatctagtaattctgagaatatggatccaaatgaaataaaggcggaagaaaaggtaaaagagaagcttagaaaaaagcttagagcaggtgagcttgatgatactactattgaaatacaaatttctagtaaaatgccattttctacaatagaaatatttacgggtggtaattttgaagagattgatatgggaattggcggtttgctgggtaatatatttgatagaaaaaagaaaagagaattgaagattaaaaaagcaaaggaaataatattagcagaagagcttgagaaattggtcgatcacgaaaacatttcagatattgcaaaatctaaagttgaaaatatgggaattatttttattgatgagatcgataaaatagctgctaagaataggagtggcaatgatgtgtccagagaaggtgttcaaagagatattttgccaattattgaaggttctaaagttaatacaaaatatggaatagttgatacttctcatattttatttattgcagcaggagcatttaatttagctaaaccttctgatttaatacccgagcttcaaggaagatttcctattaaggttgaacttaagagcttaagcatagacgatttgaaaaaaattttaaaacaaacaaaaaattctttaataaaacaatatgttgcgatgtttaaggtttatgatttagatttaaagtttagtgaggaagctatagatagaattgcagagcttacttttaatatgaatcttgagagtgaaaatcttggtgccagaagacttcacggtgttatggaaatagtgcttgcagatcttttttttgaagtgcctggcagtaagttgaaaaaatttgaaataaacttggactatgttaataaaaaaatacaaattaacgaacaaaaagatttgaattattatataatt

SEQ ID NO: 293 - DNA, 684 bp, Borrelia burgdorferi s.s.
atgagaaaaataacaataatgatacttttctatggcttgataataaatgtttgccctactacaacaacatcaatattaaaacttaataaaaaagcaaacaaacatacaatagaaaaactttaccaaaaatcaatgttactaaaagattcaaaaaaatataataaagcaatagaaagtctaacaaaaataattaacatggatcaaaatcaagctgatgctcatcttttgctctcagaattagaatatttaaataaaaactggaaaaaagcaattattaaatctcaagattacttaaaaataatagactttaaagataaaaagaactttttagatatctcttgggcatactttttaataggagaagttaaaaattcaatggactatataattaaatttttccaaagcggtaaagaattgttcagagaaaacatatttatagcaattgatgccctttttaaaaaaagtatttatcattttacaaacaatgaaaatgcagcattcaatgcaatattatcttcaacgtttcaattagcactcaatgacgacacattgtttataatttttttaaataatttagaaataataaaacaaatacccttctatcattttaatagaaaaaaattagaagaattatatctacaaatcagcactctaaaaacaattcaaaacacaacgtgcagaact

SEQ ID NO: 294 - DNA, 1131 bp, Borrelia burgdorferi s.s.
atgaatataaagaataaattaatatcgctgctaattgtagtagcaatctcttttatcgcatgcaaaacgcctccagaatcaagagagagtaaaaatgctaaaattgcacaaccagataataaaaattttcaattaagagatataaaagacattaaaaatgaactaataagagaacggggacatcttttttattccaaagagtttaatgaagctgaaagattagaagaagcaatgaaacaaagtttttccaaaaaaaaagcaatagaaggaaatgaaattgctctaaaagtacttgaaagatacaaaacaataataagagaaacgagggaaaaaaaagaaaaaacaaattaccttaaagaaaatattgaaaagtatctaaacgatgcagaagcaaatgaagcatacatatggatcccgctggaaatcgacgaagtaaataatttatattttgaagcaacaagaaaatataaaaattacgatcttgataatgcccttgacatgtatagcaaggcctttaacagagcacaacaagcagcaaaaaatgccaaagaagctaaagctttaaaagaaactgatgagagaatgtacaaacaattaaaagcacttgaagcggcttccaacttaccaatttatagcaataataagcttataaagccatctccatggaatggtagagcattcattaaagaaagaaacagtcacttaaaccttttaaatactaataaagacacttatcttcttggagaagcagaaatttcaattccaatagtactcgcatacgaagaaaaagtggaaatagcaaaaaactccaaacctcaagaacaattcaaaacgctagaacttattgaaagatctagaacattgtgggaaaaaggggttgaggctaaaaatgtaaaaaactttagacttgccaatgaattatttttagaatctgcaagataccttgaagcttatcaaagcaatgcaagcagcgagctttacgtaataaaaataggcaataccctatggggcatttccaaaaaattatacaacgatccttacttatggccaaaaatttggtttgccaacagacaaaaaatacaaaatccggatctaattcattctaactggaagataataattcctgccaaa

SEQ ID NO: 295 - DNA, 1584 bp, Borrelia burgdorferi s.s.
atgaaattacaaaggtcattatttttaataatattttttctaacttttctttgttgtaataacaaggaaagaaaagaaggagtatcatttaaaataagcttgggagcagagccaagcagtcttgaccctcaattagcagaggataatgtcgcatcaaaaatgattgacacaatgtttagagggattgttacaggagatcctaatacagggggaaataaaccgggacttgcaaaagggtgggatatttcttctgatggaacagtttacacatttaacctaagagaaaaaatcacttggagtgacggagttgcaatcactgcagaaggaattagaaaatcttatcttagaattttaaataaagaaactggctcaaagtacgttgaaatggttaaatcggtaattaaaaatggtcaaaaatattttgatggacaagtgactgactctgaacttggaattagagcgattgatgaaaaaacattagaaataacactggaatcaccaaaaccttattttattgatatgttagtacaccaatcatttattccagtaccagttcatgttaccgaaaagtatggacaaaactggacaagccccgaaaacatggtgacaagtggtccttttaaattaaaagaaagaattcctaacgaaaaatatgtctttgaaaaaaataacaaatactacgactcaaatgaagtagaattagaagagattacattttacacaacaaatgacagctcaacagcgtataaaatgtatgaaaatgaagagctagatgcaatttttggttccatacccccagatctaatcaaaaatctaaaattaagaagcgactattactcatcagctgttaatgccatatacttttacgcgttcaatacacacatcaaaccacttgacaacgttaaaattagaaaagccttaactcttgctattgacagagaaacgcttacatataaagttcttgacaacgggactacccctacaagaagagcaactcccaactttagttcatattcttatgcaaaaagtttagaattatttaatcctgaaattgcaaaaacccttctagctgaagctggatatcctaatggcaatggatttccaattttaaaattaaaatacaatacaaacgaagcaaataaaaaaatttgtgaatttattcaaaaccaatggaaaaaaaatttaaatattgatgtggaacttgaaaacgaagaatggacaacatacttaaacactaaggcaaatggaaattatgaaatagcaagagcaggatggataggcgattatgctgatcctttgacatttttaagcatattcacacaaggatacacacaattctcatctcataattactcaaacccagaatacaacgaacttataaagaaatccgaccttgagcttgatccaataaaaagacaagacattttaagacaagcagaagagataattattgaaaaagattttccaatagcaccaatatacatatatgggaacagttaccttttcagaaatgacaaatggacagggtggaacaccaatattttagaaagatttgatttatctcagctaaaattaaaaaataaa

SEQ ID NO: 296 - DNA, 1623 bp, Borrelia burgdorferi s.s.
atgagctttaataaaactaaaaaaatcggtaaaaaaattaaaatagtaacactacttatgcttgctgtgtctttaattgcatgcaataataattcagaaaaagaaaaattagcatttaaagtatacatagggggagcgccctcatcgcttgaccctcatttggtagatgagacaataggagcaagaattttagaacaaatattctcagggcttttgacattaaataccaaaacaggaaagctaaagcccggacttgctaaaaattgggaagcctcaaaagataaaaaaacatatcaattttatctaagggacaaccttttttggagcgatggagttgaaattaccgctgaagggataagaaaatcttttttaagaattttaaataaagaaacaggatctacaaatgttgacatgctcaaatcaataataaaaaatggacaagagtattttgacgggaaagtatccgattctgaacttggaatcaaggcaattgatagtaaaacgctggaaataacacttacggccccaaagccatattttcttgaactgcttctacattacgcattcatgccagtacctattcatgtgattgaaaaatataagggaaattggacaagccctgaaaacatggttactagcggtccttttaaattaaaaaaaagattacctaatgaaaaaattatctttgaaaaaaacgaacgttattataatgcaaaagaagtagaacttgatgagcttgtctacattacgtctgacaatgatcttactgtgtacaatatgtacaaaaacaacgaaattgatgctatttttaacagcatcccgccggacattgtaaatgaaataaaactacaaaaagactattaccaacacaaaagtaatgcaatttatttatattcatttaatacaaaaataaaaccccttgatgatgctagagttagagaagctttaaccttagctattgacagagaaactttaacttacaaagtgctaaatgatggcacagttcctacaagagaaataactcctgatcttaaaaattacaattacggtaaaaaattggctttatttgatcctgaaaaatctaaaaagcttttggcagatgcagggtatcctaatgggaaaggattcccaatgctaacactaaaatataatacaaacgaaactcataaaaaaattgctgcatttattcaaaaccaatggaaaaaaattctaaatatcaatcttatgcttaccaacgaaaattggcctgttcttaccaacagcagaaatactggcaattttgaaataataagagttggacgcattggggaatatttagatccacacacatactttactatattcacaagagaaaattcacaacttgcatcatacggatattcaaacctagaatttgacaaactcatcagagaatcagatcttgaaaaagatcctataaaaagaaaacaattactcagaaaagcagaatcaataataattgaaaaagattttcctgctgcaccaatatacatatattctgggcattatctttttagaaacgataaatggactggatggaatcctaatgtatcagaggtttattatctttctgaattaaaaccaattaaaaatgcaaaacataat

SEQ ID NO: 297 - DNA, 1194 bp, Borrelia burgdorferi s.s.
atgaaagaaaatgattttattaaatttgggagttatttgagaaaagttagagatagtaaaaatttgactcttgaaatggtagctgaggatattaaaatttctattaagtatcttaaggctcttgaagaatctaatattgaaattttcccaaacgaagttttggctgttggatttttaagaacttatagcgaatatttagacattgattctagattgatatcaacactttttaaggattataaaagtagacttaataatagttatattgggattaaatctgaagataaaatttcaaatttaggatttttaagcgacaataaagtttcagaaaaaaaaatatttttttttagtttagaatctttaagtatttttaaagtctttttaggcattgttggtgttcttttattatttgtgtttctctattttagagaagtggaaggctattttaaaaaatttttcaatcttagtcaggatgaaaagataatttcaaatattcatgaagtgtcttttgataaaaagaatttttggaacgtttctcttaaagagggagattttttatctttaacgtatagtgatgatattgcaaaatatagagcatcgtttattggcgatgatttagttattgttgatgagtctaaaaaaagtaagaatattttaaatttaggagagtttaaagagataaatcttgatgataatattagagtcaaaattatttatgagaattattattatgataagttgaaaatagctcatgtaagtttagagtcttttgctttaaatgttaaatatgtatctgaaactaatattgacaatagatttaatattttaaattggcagtttgatgttaagggaactgaaaaattgccgagcagcaattatcttaccctatattcttctcaaaaactttcaaatgttgatttgaaaatcgattttttaaatgatacattttttagatatgccgatgaaaacaatctttatgggaagtctctttttgcatccaaaggtattcctattaatttagcttttgaaaaatctttgatactatttttttcaagactttctgatgttaatatcattcttaatgacagagacattactccttttttaaaagagcagggaaaagaaatttttgctgttcaatttttttgggtaaagaccccctcagggtttgatcttaaggtttctgaagtttat

SEQ ID NO: 298 - DNA, 1425 bp, Borrelia burgdorferi s.s.
ttgataaaaatgtctttgaattacactgaaataaatactttgattaaagaaattcctttcacaaactctttaataacaaaaataatacaaccggattacaaaagtttggttttagagatttacaataaaattgacaataaaaaatttaaaatactaatctgcttaaatccaaacactacaagattccatataacaaaaaaaaatttcaaaaagaatgctttaaaattaagattttctgacttcttaaaatcaaaaattcaaaatggaaaaattataaaagctttccaaatgaaaaatgaaagaatcatttctcttgagattttgcaaaaagatatgattatcttatttattaaattgtggccatcctcgcccaatataatagctacaaattcaaactttaaaatactagatgcatattacagaaggccaaaaataaaagaaacaacaggtgaaatctttttaaaagctaaagaaatacatgaaagcaataaaatgtctgataaaaaaattatggaactaaaggaagaatataataataccagctatacatcttattctgaatttcttgaaaattactacgaatcgcttaatgatcaaattaaaaaaaccaatataaaagaattgcttattgaaaaatataaaaaagagttaattgttttagaaaaaagaatagactctttaaaacaacaaattaaactgcttgaaaacattgaaaacgaaaaggaaaaaggcgaattgattttattaaatattaacaaaatacaaaaagggattaaagaaataaacctcttaaattataaagaagaaaaaattaaaatatccttaaaccaatcattatcaccaaaagaaaatgccttgcaatattttaaagcatataaaaagggcaaaaattctttcaaaaccatacaaaatcaattaaaagataatctagataaatttaatttaattcaatcaaaaataacaatgttaaaagtcgaaaatttaattccggaagaagaatataatcaagaaaaaactgctattaaagaaaaagaaaaaacgccaaaaataggcttgcattttacctattgtggatttgaaattcttattggaagaaacgcaaaagaaaacgataaacttttaagacattgcgttaaaggaaatgactattggcttcatacaagagattatcctggagcttatgtttttattaaaaatcaaaaaaataaaactcctagccttgatgtccttttaggtgctggtaatttatgcgtattttacacaaaattagcaaaaaaatcgggaaaagccgatctttactacactcaagttaaaaatttaagaagagttaaaaataaaaagctgggccttgtaattccaaaagcagaaaaaaatttacatattaagctagatgaaaatctaataaaaaaaataaaaaatcaaacc

SEQ ID NO: 299 - DNA, 1797 bp, Borrelia burgdorferi s.s.
atgaaaagagaaatatatgcatttttgagcaattttattatttttatgtgtttttttctaggtttgctctttagttattcatatttttttggagaaaattttttagaaaagcataaattaatagcaactttttttgattctattttgcttttttataagtatttttttgggttttttatttttattgtttgtatttactttgctttttttgttcagcaagaaataaagattcatttaaaatcgcataatggatatttattttccaggctttatgcatttttactattattttttattataggactcttttttacttttatatttaatttaattttgccttatataattgctcagagaaatgagtataagtttagttatgatagatataatcttcttgaaagtgaagcaaatgaaatatctcttaaaattaaacatatagatataagtttggctgcaaatagattttttttatcttctgatttgacagattcaatgaagcaaaagagaaagcatcttgaaaatttgattagaatatatgataaaatgcgaattatttatgtaaataatgaagagcttttaacaaattattatttagtgaaatctgaatatagtaaaattccaagttatgacgttgatttagaaaaagttaaaaaaactttttcaaaatatcctttgcaaagtcttaaaaagcaagatttttttaatattgtcaatgaatttatttctaaaaatgattattatacagccaattattttgcttatattgcttatgttgcaacaaaagacgataattttgttgtgcttttaaatttgactttaaagtttattaatgaaaacaggaattttgaaaaagaaaaaatgcagttgatttccgaagaaaagcaaaaaaattttttgtttcttaatactgaaaaatttaaattagcttattacgggttttcgaatctttataagttattgcccagcgataatgaaattttgaattataaaaataaatctcttgaaaagcttaggaaaagatatcttttttttgatgagattgaaaaatattttgaatattacggaataaacgatgtatttttattgcaaccagattctaagagaggtttttatgattatatttatatgcaaaaagttgtggcctttaacaatcattctaaaataataaaaaattttgaacttattagatttaataatacagggaatgttatattacatattaaaattccatttgctactttgaagggtaattctgtgtatcaaaatattttagataaagacaatgagcagagcgaaattactcttaccaaggtctttgtgtctacggatagctttgatacaaatgttttagaggttgtcaaaattaatgagaatgtagaaaatttagctttattttcaaattttactgagtttggattttttttaaaaattcaaaatttgccaagcgcttttcatagggttgctatattaaatttgaaattaattaatactttttccttaagtttggttttgctgatttctcctatttcgctagttttaataggggcattttttatctctttgttttctaaaatagaatttaatttcaattccaaggctatgatttttctagtttcattaatgatagctattttctcagggattacttgtctttttgtaaattattttctaattgtttttacctctcttcttatatatgtttttaatagcgtttacgtatctttagctattctttctgcattattgttttttcttatttttaaaataattactttgaattacaaggaaagacttatt

SEQ ID NO: 300 - DNA, 1425 bp, Borrelia burgdorferi s.s.
atgaaaaataaatttttaatatgtgtatattttttattgactctgggtataagctctttagtaattgttgaatctatttttgcttttgatgaatctaataataagttatcaagatcaaattatgagcagatgatgattcaagcttttgaatttgtaaaagaaaattatgttgatcctgtaagtgatgaagtaatttttgaaggtgctttaaaaggaatatttcaatccctaggcgatccttattctcaatatttgacaaaaaaagatttagaagaaatttcaaaaacaacagtaggagattatgttggcattggaatttctataataaaaaaaatgcattcccaagataagcaagacaaggcaaaagattttgatcctaatagtgcttgtgtttctattgttacgccttttgaaggaggtccggcttataaggctggaattaaatctggagattgtattaccgctgttgatggcaagagtgtttattctatggaagtagatcaagttgttgatcttttaaaaggtaaagaaggcacaaaagttaaagtatctattcttaggggaaaaaatttaacattggattttgaacttacaagagagaagatagaaatacaaacratcaagtatgacgttattaattcagatattggctatataagaatagtaagctttaatccacacacctctgtagattttagaaaagctttagataatcttaagaataaaaatattaaatctttaattttagatttaaggcttaataccggaggatattttcaggcagctataaaaatggcggatgatattttatctaaaggaattattgtttccacaaaatcaagaaattctagcaagcctattgattataaggcaagctcaaaacaagttttgccttcaaatataaaaattgttgctttaatagacagatcatcagcctcagcatcagaggtttttgtaggagccttaaaagacaataagagagcatacattataggggaaaagtcttatggcaaggggcttattcagcatgtagttcctttttatactggtggatttaaaattacaagctcaaagtattatactccatctggaaagagtattcataaggttggaattgagcctgatttggaaataaaatctccagatttttctgaggaggaggcattaatatataaagaaatttttgataaaaagctgatagaaggttttttgaagggtaaaaaattcattaccgaacaagagattgatttttttgttgagaatcttgtaaaagaaaatccaaaatataaaattgataaagaatttttaggcaagtatgtgttttttaattactatcaggacaataataaagaattgccaatttataatctacattatgacaaagttttaaaaacagcttgtgagtatttgtctaaattaggtaat

SEQ ID NO: 301 - DNA, 1374 bp, Borrelia burgdorferi s.s.
atgaaaaaacaaaatccatggatatatttaaatgaagaagaaaaaaatcaaattttaaatttttctgaaagttacaaaaaatttataagcaaattcaaaacagaaagagaagttacagcctatgccctagataaagcaaaaaaattggggtttattaacgctgaagagaaaaaaaatttaatgccaggtgataaaattttttatacctgtagagaaaaatctgttgcttttgctattattggcaaaaatcccattgaagatggaatgaattttattgtttctcacacagattcaccaagacttgatgcaaaaccctcaccaatctctgaagaaaatgaacttacatttattaaaaccaactattatgggggaataaaaaagtatcagtggttatctacacccctttcaataagaggggtggtatttttaaaaaatggagaaaaggttgaaatcaatattggagacaatgaaaacgatcctgtatttgtaattcccgacatcttgcctcatcttgatagaaaaatacaaagaaataaaaaatcagatgaaattgttgaaggggaaaatctaaaaattttaattggaagcctgccaatcgaaacaaaagaaaaaaataaagttaaactggcaactttgcaactaataaaagaaaaatacaaaatagaagaagaggactttgtatcatcagaaattgaaatagtgcctgcaggaacagcaaaagacgttggatttgacaaagcgttaattggggcttacggacaagatgacaaaatatgcgtcttcacttcactagaatccatatttgatcttgaagagactccaaataaaacagccatttgctttcttgtagataaagaagaaattggttcaacaggttcaaccggactagactcaagatatcttgaatattttgtttctgacatgatcttcaaaattaaaaaatcagaatacaacaatcttcacgtccaaaaagctttgtggaattcaaaaagcatttctgctgatgtttgtgcagcaataaacccactatttagttcagttcatgacgaacaaaacgctccccaacttggctatggaatacctataatgaaatacacaggacatggtggaaaaagtatggcaagcgatgctgatgctgagcttgtttcttatattagacaattattaaataaaaacaatatagcctggcaagtagcaacactcggaaaagtagaagaaggaggaggaggaactgttgctaaattcttagctggctatggaataagaacaatagacatggggcctgctgttataagtatgcattctccaatggaaataacttctaaatttgatttatacaatgcttacttagcatataaagctttctacagagaa

SEQ ID NO: 302 - DNA, 1032 bp, Borrelia burgdorferi s.s.
gtgctttatatgagaattgtaatttttatattcggtattttgttgacttcttgctttagtagaaatggaatagaatctagttcaaaaaaaattaagatatccatgttggtagatggtgttcttgacgacaaatcttttaattctagtgctaatgaggctttattacgcttgaaaaaagattttccagaaaatattgaagaagttttttcttgtgctatttctggagtttattctagttatgtttcagatcttgataatttaaaaaggaatggctcagacttgatttggcttgtagggtacatgcttacggacgcatctttattggtttcatcggagaatccaaaaattagctatggaataatagatcccatttatggtgatgatgttcagattcctgaaaacttgattgctgttgttttcagagtagagcaaggtgcttttttggctggctatattgcagccaaaaaaagcttttctggcaaaataggttttatagggggaatgaagggtaatatagtagatgcatttcgctatggttatgaatctggagcaaagtatgctaataaagatatagagattataagtgaatattccaattctttttccgatgttgatattggtagaaccatagctagtaaaatgtattctaaagggatagatgtaattcattttgcagctggtttagcaggaattggtgttattgagacagcaaaaaaccttggcgatggttactatgttattggagccgatcaggatcagtcatatcttgctcctaaaaattttattacttctgttataaaaaacattggggacgcattgtatttgattactggcgaatatattaaaaataataatgtttgggaaggtggaaaagttgttcaaatgggattaagagatggtgttattgggctgcctaatgcgaatgaatttgaatacataaaagttcttgagagaaaaataatcaataaagagatcattgttccttgcaatcaggaggaatatgaaatttttataaaacaaatattaaagtta

SEQ ID NO: 303 - DNA, 2352 bp, Borrelia burgdorferi s.s.
atgcttgacatcatcaaggaacttggttttaggtatgccactaagtttggatgcacaattagtatgagcgatattattgttcctgatgaaaaaagaacttatgtagaaagggccaataaagagattgctaagattcaaaatgattatgctaaaggtgttattactggcgaagagcgttataacaatgtagtttctgtttggttaaagaccaatgaagaacttactaataagatgatggaaattttaaagaaagatagagatggatttaatgttatatatatgatggcagattctggtgctaggggtagtaggaatcaaataagacagcttgctggtatgagaggattgatggcaaaaacttctggggatattattgagcttccaattatttctaactttaaagaaggtctttctgtgatagagttttttatatctacaaatggagcaagaaaaggtctagcagatactgctcttaagaccgctgatgctggatatttaactcgaagattagtagacattgctcaagatgttgttgttagaatagaggattgtggaactataaatggaataaaagttgagactgtaaaaaatggtgaagaaatattagaatctttgaaagaaaaagctgttgggagttattctattgaaagaataaaaaatccaattactggcgagattgttttagatgcaaatgaagaaatctcagaagctaaaatagaattattagagaaaattggtattgaaaaacttgttattagatctgttttaacgtgtgaagctgagcatggcgtttgtcaaaaatgttatggtagagacttttctaagaacaaacctgttaatattggggaggctgtgggaataattgctgctcagtccataggtcaaccgggtactcaattaaccatgagaacttttcatattggtggagttgctcaggctggcagtgaggatgataaaatatctttaaagaatgccttcatacttaatggcatagaaggttttaatgttagagttgataatggaattcttttcacaagaaaaggaactttaaaaataatcaatgttttttatgaggaaaaaattaagaacataaaagagattaaagttttagattctcaaagagtaataaaaggaattcctttgtttattgataaaaagggctcagagattctctcttcttacattggttatgttaaattaagagacgataattttttcatagtgtcagaagagcaagaagtttccttgaaagcgggtacaaagcttgaaatagaggttggtgattatgttgaatcaggcaaagttattggtacatttgatccatttgcagagcctattattgcagaggttaagggtaaaattaaatttaaggatattattttaggaactactcttaaagaggaaataaatactgaaacaggcaatgttgaaaaaagaattacagataatgtttttgaatctcttgatcctagaatttttattattgatagtagtggtatggaggttgcatcttatgtattaccaggtgatgcttatcttcaagttgaagatggccagagtattaacataggagatattattgcgaaactttctaaaggttctgaaaaaactcaagatattacagggggattgcctcgtgttaatgatctttttgagacaagaattcctaagaatttaactgaaatggctaaagtaagcggaattgtacaatttaaatcaattcaaaaaggtaaaaggcttattaatattttagatgagtatggggttgaacataagcattatattccagctggaaaacatcttttggttagagatggagatgttgtaaaagcaggagatatgctttgtgatggtagaattaatcctcatgatgtgcttgaaattttaggtgggattagtttacaagaatttctgttggcagaaattcaggatgtttatcgaaaacagggtgttagcattaatgacaaacatattggtgtgataatcaagcaaatgatgaaaaaagttaagattgttgcagttggtgatactaattttgtttatgggcaaaaggtagataagcacactttttatgagcaaaatagaaaagtaatcgaacaaggtggtgagccagcaatagcaagtccaattcttataggagtaactaaaacgtctcttaatatagattcttttatttccgcagcttctttccaggaaacaacaaaagtattaacagatgcttctattgctggaaaaatagatgatcttaggggattaaaagaaaatgttgtaattggacatttaattcctactggaactggtatgggtctttataaaaaaattaaagttagtgaaaatatcgattctgaagtt

SEQ ID NO: 304 - DNA, 3465 bp, Borrelia burgdorferi s.s.
atgataaaaagagttcatctgggacaaggaagagctgatgagattttagacctacctaacctgatagaaatacaattaaattcttatgaaaaatttttacaacttgataaattaaaaagtaaaaaacctttacttaatgagggccttgagtctgtttttagaaatatatttcccattaaaagtggaaatggtgatgttgctcttgagtatgaaagatactatatagaaaacgatgcccttaattttacagaaaaagaatgtaaaagaaagggtcaaagttatgaggctgttttaaaagtaagattgaatttgcaatttttgactactggggaaataaggcaaaaagacgtatacatgggaactattcctttaatgacagaaagaggcacttttattattaatggggctgagagggttgttgtttctcagattcacagatccccaggagttgttttttataaagaaaaagatttgtattctgctagaataattccttatcgtggttcttggttagaatttgagattgattcaaaaaaagattatctttatgtaaaaatagatagaaaaaaaagaatacttataactctttttttaagagctttagggtttgatacgagagaaaaaataatagaaactttttacaatattaaaaaaattaaagttgaagacggtacaaaaagagatcttccagggcaatatttagctaagagtattaacataagagagaatatgtattatcgtgcaggagataaaattactctgcaagatgttgaagattttttacaaaatggagtaaatgaaatagagcttgttgattttgatggttataatgatatttctggaaagcgctttgtaagttcgaatgttattctaaattgtcttgaaaaagaggatgctttctttgctttaaaggatggctctaaagagcttccaaaagaatcagttatgctagctgtttatggttctctttttcccggtgagccaatatcaattgataatgctgaaaacgatttaaaaaccatattcttttctgaaagaagatatgatcttggacgtgtggggcggtataaactttctaaaaaatttggatttgatgatttaactacatcggttttaactatggatgatattgttaacaccatatctcatcttttaagaatatatgaaggccatgatattcttgatgatattgaccatttaggaaatagaagggttcgttctgttggtgagcttcttactaatatatataaaggcgcgatgtcaagagttgaaaaaattgctaaagatagaatgtctaacaaggaagtttttaatctaaagcctcaagaattaataagcgttaagcctattgtatctgctgttaaagaattttttgcaaccagtcagctttcacagtttatggatcaggtcaatcctttggctgagcttactcacaaaaggcgtcttaatgctcttggaccaggaggactttcaagagatagggcaggatttgaagtaagagatgtgcattatactcattatggtagaatgtgtcctattgaaacccctgaagggccaaatattggacttattgtttctttggctacttattctagagttaatgattatggttttttagaaactccttataggaaagttgttaatggagtggtgacggaccaattagaatatttatctgctattgacgaagagaaaaagtgtattgctcaggctaatgctgcttttaattctaatggaaagtatcttgaagatttagtttctgttagaatttctggtgattatactacaacaagtcccacaaatatagactatatggacgtttctcctaggcagctaatttcagtatcttcggcgttaattccttttcttgagcacaatgatgcaaatcgagctcttatgggttctaatatgcaaagacaagcagtacctttgcttttccctaagcctcctattgttggtacgggtatggaaagcgttgttgcaaaggattcaggagtagttgttaaggctaaaagaagtggggaagttattcttgcaacaagtagtaagatagttgttaaaccttttgaggcagagaatgctaaagatttagatgaatatcatattgttaagtatgaaaggacaaatcaagacacttgttttaatcaatccgttttagttaaagagggtcaaaaagttgaaaggggcgagataatagctgacggtcctgctactagatatggagaacttgctcttggtaataatttattgctaggagttattccttggaatggatttaattatgaggatgctatattaatttctgatagaattgtaaaggaagatctttatacatctattcatatcaaagaatttagcatagaggtaagagaaactaaacttggtcctgagaaagttacaggagatatacctaatgttagtgaaaagatattaaataaattggatgaaaatgggattatacggataggaacttatgtaaagcccggtgatattctggttggtaaagttactccaaagtcagaaggagacattactcctgaatttagactgttaacttccatttttggagaaaaagcaaaagatgttaaaaataattcattaaaagttcctcatggtactgaaggtacagttattgatgttcaaaggattaccaaagaggatgttggtaatctttctcctggagttgaggagatacttaaagtttatgttgccaaaaaaaggaagcttaaagagggcgataaaatggctggacgacatggtaataagggtgttgttgcaaagattcttcctgttgaagatatgccttatcttgcagacggaacccctcttgatatatgcttaaatcctttgggagttccatctagaatgaatatcggacagttaatggaatctcaattaggccttgctggtaaatatcttggtgaatcttataatgttcctgtttttgaatctgctacaaatgaacaaattcaggaaaaattaaaaactgctggatttaatccaacttctaaagaaattttatatgatggttatacaggagagccgttcgaaaatgaagtaatggttggggtgatttacatgcttaaactacaccatcttgttgatgataaaatgcacgcaagatcaacaggcccatattctcttgtttctcagcaacctcttggaggaaaggctcaatttggtgggcaaagacttggagaaatggaggtttgggctcttgaagcttatggtgcggcgcacacccttcaagaacttttaacagttaaatctgatgatatgtcaggcagagttaaaatatatgaaaatatagtaaaaggcgttcctactaatgtatcagggattcctgagtcttttaatgtgctaatgcaagagcttagagggcttggacttgatttgtcaatttatgatgatgctgggaatcaggttcctttgacagaaaaagaagaagaattgattaataaaagc

SEQ ID NO: 305 - DNA, 1026 bp, Borrelia burgdorferi s.s.
atgttaataaaaaaaatttgcttttgtttgttacttttgcaagcaaaaataattctttcccaagatcaacagaacttagaatttaataatgaatatttttattttaattttcaatctgcttattatcctccccacgagctgggtacaaatggaagcggcttttcacaaagctttaaacatcctaacttccaaaatattgacccaagtttaaaaattccagtcaattattgggggggaataaaactaatatcatatttgggctactataaaaattttaaagccctaaacaatcccaattctatattttttaaaaataatggtatagatatagatttaaatatcggattgtctcctgtaattgtctcatttaaaagcacagtaagctttactcctattgcttttttaaatttatatgcatcaaatgaacttggcataggttggcaagcttttggatttaaaggagtaggcgtacacattgaaaatgggaaatattcaaatgctgttgaattttattcagaaataacagcggggggacgattccaatttgacttaaacgctatttttcaaggagaatggacacacattattacagttattggaaatgattttacatacttaatcaatccccatgcaaaaaaagatcaactttggaaatataaagcagatgatggtaaaaatataaatggcatgctaataaaaccttacgctcttttggcttacaaaatgccaatacctcttaacaccataggcctgctttatgaaggaaaaacacaaattggcaaagaaagaaacataagctcttggaaaaacaaaggctggggaagtgatattttttatcacaacatttctattgttgctaattttgaaattatcaaacctttaacacttggccttcaatttaaattatctacaaatcccacatacacaagtaacacagccggactggctgatatttcaaaaagaatagcaactggcaattcttatttttattacgattctattggaatgtctataacttataaatac

SEQ ID NO: 306 - DNA, 4482 bp, Borrelia burgdorferi s.s.
atgaaaaaagcaaactttttaagtactaattttttaattttacttttggtttgctttgtcaacgtcaatttattttctaaggatattttcaagtttaagcttgtagatcaattttttcctttttactacaagaataataaaggagaatatgaaggacttattttttctattttagataaatgggcaaaagataataatgctgatattatggttgagcatattgataatttaaatgaaagtgaaattgaagacgaagcaatatatttaggattaacttataatgtaaaattaaatgattttttttattttaaaagtgagcttgctaggagtatttcaattttattttttaaaaactctaataaaaaatataaaaatacccattcaacatttttatccaattttaatataggagttattaaaaatacaatatatgaagatatcttaaggttaaaaaacgttaacaccatttttttggctgataattctcaagagttagtattggccttaaaaaacgataaagttgattatatatatggtgattgcaagactttacattatattgcaaataactttttaagtgaagatcttgtgatttttaccggggatgttttttatagtatcaaaaatagagtggctattagtagaaatgctcctgagatagtaaagaatttgaatttagatttgttttcatatttaatgaaaatgcctgaggaacttgttttttcttttttagatagcaatgctaagggaagttttgttgatgttggtttatataatgattatcctcctttaagttttattaattcacagggaaaattgtctggcattttagtggatttgtggaatcttctctcaagacaacatatctttaaacctatttttaagggattttccaaagaggatattaagaaatcattagatggaaaatcagtaggtatttttggaggaattattagcaatgatagtgtgttggaaaatgttaattatgtagtaagtaagccaatatatcctcttaattttaaattttattctaaagacctaagcaatgatgctggtccaataaattctcagtttattgattttaattttaataatattcaattaaataagaataaagatattgttaataactttatagatattgttaataattcatatgggtttatagaaaattcaataacaacaaaatatttgttaaaattaaatggatataacggtagattaaaatcttacgattcgatttttaataaaaataggtttttagtattagccattgataataggatttataaggttattaaatatattctcaattctatatttgatgatatttcatttgaatctttgcttcaaatagataaaaattggttggataaagaagagattaatagttctagaataaatagttataaaattatgaataaggttaaatttaatatagaagaaaaaatttggttatcaaaaaataataaattaaatcttgctgttaaaaattggtatccaatagattatgttgaggcaaataattataaaggaataaatcaatttttgcttgataagattagaatgttttcaggtttgagatttaacataattaaagtacacagcagtttagatcttaaaaaattaatcaaatctggaaaaatcgatatgctaaatactaatgcaaccgattcaaatttagataatgttttcaacataaaattaaattctcgaattccactttatattttttcaaataagaaaagggtgcttccatctagatctttagaaaagtttgctatacttgattttttatatagtaaaaatttggcttctaatattaaatcaaagcttattctggtaagcagttttaatgaagcgttgcttcttctttataagggaaaggtagatgggattattagcgatgagtatacagctgctgctgtttttgaggaattaaatattgatgatgttgaaaaaattcctacttttagagatttggcttttgatttgagtcttgctatttataatcaagattatatcttgaaagaaattattcaaaaagttgttatgcgttcaaatgttgacagtcagatgtatttaaatgattggaaatttgatatttattataaatccagaagtatcaggtttaaaaatttcaaatttttagtgataacattcattatattttattttacttttttaggatttgtaattatatttatgttcagattatcatttgagcagaaaagaagatattcttttgtgatgaatgaaaaaaagattgcggaagccgctaatgctgctaaaaccatttttatagccaatgtcagtcatgatattcgtacccctattaacggaataatggcggctactgagcttttggatacaactattcttacagatgttcaaaaagattatgttaggatgataaattattcatctgattctttgctttctttaattgatgatatattgtatttgtctaaaatagatgtcaatgaattatatgttgagagtcaagagattgatttagagagtgaaatggaaatggttttaaaagcttttcaatctcaatgtgcaaagaaaaatattgatttattctcttattctaaatctatttttaataattatataaagggtgatattgtaaaaattaaacaagttttaattaatttaataggaaatgcttttaagtttacagatgatggtgttattgttttaaattatgaagaagtatgtagaacaagaactgatggtaatagggttttggttacagttgaatttaaggtaatagatacaggcaaagggattgaaaaagaaaatttttctaagatatttgaaatatttaaacaagaggatgattcttcttcaagggttcatgaaggtgcaggattgggattgtcaatatctagagagcttataagactaatgggtggtcttggtattgctgttgatagcaaggtgggagagggtacaactttttcatttatgttgccctttttattgggtagtgagcttaaaagtaaaaaattgtcaatcaatagatttcaatcagtaaatggtgacaataaagtattaaatgtgcttttaagtcaaaaatctattaaaatttttgagcactgttcgattttattgggatgctcttctaatgtgcgctatgtagcgtcttttgaggatgcttataaagtcttcaagaaatacccttcttataattttgtttatataaatgtaaataacgataatattcaagagggtattcgacttgccaataatattgaaagactaaattctgatgtacaaattatttttttattttattatttagataataaagctctaaaaaatttaaaatatggttatgttaaaaagcctttaatggggcttggtatatgctctattctttataaaaaagagtttaacccagaaatggattttgaggatttggttccaatagatagtgctttaaggataaaagagcccattaatgttttaatagctgaagataatcaggtaaatcaaaaagtgttgaaagatattcttgttgttataggcattaatgaaaattttattgatgttgtagatgatggagtaaaggctttaaaatctttaaaagataaaaaatatactatctcttttattgatatacgaatgccaagatatgatggattttcggtggctaaggaaattagaaaatttgaaaaggcaaagaatttaaagccttgtgttttggttgctgtaacagcgcatgctttgcaagagtataaagacaagtgtcttgcaagtggtatgaatgattatatctcaaaaccaatacacataagttcaattaaaactatattaaaaaaatacttacagtttgaagttgatgatattggggagaatgaaaatttgaatcaacttgttaagtttcctaatttagatgttaatagggctttaaaagaattaaatctttcatatgtatcatattctgaattatgtagagggcttgttgattttatctctattaatattattgatttggaaaaagcttttgatgaggaagatttgtctttaattaaggatatatctcattcaatatctggagctctttctaatatgcgtagcgaattgtataaagattttcaaaaaattgaaacaagtaaagattcaatttctgagttgaaaaaaatgtattcttttgtaaaagatgatttatttcaactaataagcgacataaaggaaaatattttgtttgagtctgagattgttagtgagaacaagctatattttaaaaataatgatcaatttttaaaccttctcaacaaacttttaattggtattaagactagaaagccaagagaatacaaagaaattcttgagagcattaataaatatgttttagacgataatattcaggtattatttagtgatcttcgcagaaatttaagattatatagatttgctgagagctctaagattcttgaagagattattgaaatgcttaataataagagatat

SEQ ID NO: 307 - DNA, 780 bp, Borrelia burgdorferi s.s.
atggatggagtttataaaatgatagatattcaacttttagatattgataacgatcagccaaggaaatttgttagccctgttgaattagaagagttaagcatttctataaaagaaaatggaattttgcaacctataattgtttgcaaagcaaatgagagatataaaataatagtaggagaaagaaggtttagggctgctaaacttattcagatgacgaatattcctgttatagaagttaacataaaagaatcttgtagagattttatgcctttggttgaaaatattcaaagagaaaattttacgcctgttgaggaagcctatgcctataaaaatgtaatgaataaatattctttaactcaaaaggatttgtctgaaaaaattggcaaaagtagagcctatatttcaaatttagttaggattttggatcttgaacaagaaatattaaatgcagtgcataggaaagaaatttcttttgggcatgctaaagttattttatccttaaaagacaagcaagacaggtataatctttatttaatgatagtgaaaaaaaagttttctgtaagagatgcagaaaaatatgtaaaaaatttttataaatccatagtaagaaaaagggaattagaacaagatccttttttaagcaatataaaagagtttttatttgataaaattcaaacaaaaatagatattaaaggaaatcaagataaaggaaaaatagagatagaatattttacagcgggtgatttaagaagaattgtttccttttttggtaatattagc

SEQ ID NO: 308 - DNA, 1917 bp, Borrelia burgdorferi s.s.
atgaatggaaggtttatgaattatgttgctagtaacattcaggtcttaaaaggacttgaggctgttaggaaaaggcctggcatgtatataggctcagtttctattaatggattgcaccatttggtttatgaggtggttgacaatagcattgatgaggctttagctgggttttgtgatagaatagatgttattatcaatttagataatactataactgtaattgataatgggagaggtattcctaccgatattcatgaagaggagggtattagtgcccttgaacttgttttaacaaaattacattctggtggtaagtttaataaaggcacgtataaagtttctgggggacttcatggcgttggaatttcggttgtaaatgctctatcttcgtttttagaggtttatgttaatagagatggaaaaatttttaggcaaactttttcaaaaggtattccgacttctaaagtagaagttgtgggggaatcttctgttacggggactaaggttacttttttggcggattctgaaatttttgaaactttagattataatttcgatgttcttgaaaaaaggcttaaagagcttgcttttttaaacgataaaatatacatttcaattgaagataaaagaattggtaaagaaaaatcttcaaaattttattttgagggtgggataaaatcttttgtagattatttaactaatgacagcaaagcttttcaatcagaaccttattatattgatggttttattaatgatgttattgttaatgtggggcttaaatggactgaaagctattctgacaacattctttcttttgttaataacattaatacaagagaagggggaactcatgttatgggatttagaagtggacttactaaggccatgaatgaagcttttaaaaattcaaaaataagtaaaaaagatattccaaatcttacaggagatgattttaaagaggggcttacagctgttatttctgtcaaagtaccagaacctcaatttgaaggtcaaacaaaaagtaagcttggtaattctgagataagaaaaatagttgaagttgttgtatatgaacatttattggaaattattaatttaaatcctttagagatagacactattcttggaaaagcaataaaagctgctcgtgctcgtgaagctgcaagaaaagcaagagaatcagaaagaaaaaaaaatgcatttgaaagcttggcattgcctggaaaattggctgattgtacttctaaaaatcctttggaaagagaaatctatattgtagaaggtgattctgctggaggaagtgctaaaatgggtagaaatagattttttcaggccattttgccactgtgggggaaaatgcttaatgttgagaaaacaagagaagataaggttatcaccaatgataagcttattcccataattgcatctcttggtgcaggagttggtaaaacttttgatattacaaaacttcgttatcacaagatcattattatggcagatgccgatgttgatggatctcatattagaactttgcttttagcttttttctttagatatatgagagatttaattgaaaatggatatatatatatagccatgcctcctctttataaaataaagtatgacaatcgtatttattatttttatgaagagaaagaaaaagaaaaatttttagattctattgaaactaaaaatcgcaatagtatttctcttcagagatataaagggcttggggagatgaatccaacgcagctttgggaaacaactatggatcctgctagaagaaaaatgagattgatgaatatagatgatgctattgaagctgaaaaaatttttgttactcttatgggagatttagttgagcccagaaaagaatttattgaacagaatgcacttaatgtaattaatcttgatgtg

SEQ ID NO: 309 - DNA, 1518 bp, Borrelia burgdorferi s.s.
atgataaatgcaaatatgaaaacaggacattttgaaatattggcaaaaaacattgaaattatctcaaagtgcaatgaattgccatttatgatagaagatgacaataatgcaagtgaaaactcaaaacttgaatacagatacttagatttaagaagagattccttgaaaaataaaattattttaagatgtcaggctactcatcttattagaaattttttaataaaaagaaaatttttagagctagaaactccaacttttgtaaaatcaacgccagaaggtgcaagagattttgtaatcccatcaaggattcacaaaggatctttttatgcactacctcaatctccacaactttacaaacaactcataatgatagcaggatttgacaaatactttcaaatagcccgctgctatagagacgaagattcaagaggggacagacaaccagagttcacccagctcgatcttgaaatgagctttgtcaaaaaagaaaatatttttaaattaatagaaaatatgctttttttaatattcaaaaattgcatcaatattaacctacctaaaaaattcaaaaaaataacatacaaaaaggcaatgaacaaatatggaagcgacaaaccagatactagatttgaacttgaattacaagatataagtcgtaatctaaaaaattcagaatttaatatattcaaagatactctaaaaaacaaaggttcaattaaaattttaatagtaaaagataaagctgacaagttttcaagagcaaaaataaacaatttagaagaaattgcaaagctttacaaaacacaagggctttattttacaaaaattgaaaacaataaattttccgggggaattgcaaaatttttaaaaacagaagaacaggaattaataaaaacctattctttagaaaataatgacataattttctttacagctaataataactgggaaactgcatgtaaagcaatgggtcaaattagaataaaaattgcaaatgatcttggactaatagatgaaaataaatttgaatttctatgggtctatgattttccactatttgaatatgacgaaaatacaaaaacctattcaccagctcaccacatgttctcgcttcccaaaaagcaatatattgctaatttagaaaaaaatccaaaaaaaactataggtgaaatttacgatcttgttttaaatggcgtagaacttggctcaggttcaattagaatacataacaaagagcttcaacaaagaattttcaaaataataggatttcaaaaagaaaaatcagaagatagatttggattttttctaaaagcattagaatatggagctcctaatcatggtggcattgctattggcattgatagactaataatgttgatgacaaaatcaacttcaataaaagatgtaatactgtttcctaaaaattcttttgcagcaagccctcttgataattccccctctaaaatctcaaatgaacaactcaaagaactgggaattaatattgttgatggtgacaat

SEQ ID NO: 310 - DNA, 687 bp, Borrelia burgdorferi s.s.
atgaaaacaatagagcacgaactttattatgaatttaggatagctgatgatgttaaaatgatttatactaaaaagccttttaatctaaaattaaaagaacttagtaatgataattttaactttgttcctaggtctaagaaaataaaatatttaaagcaattgcatacagatattatttataaagttgaagatgattttattaattttcaagaaggagatggtcttatatctagctctttagatgtagcccttgttgcttactttgcagattgtcttccaatatacttttatgattcggtgaaaaaaattatagggcttattcacagtggatacaaaggaagctttaatttgattattttaaaaatgttatttatgtttgaaaaaatgggatcagctttgaaggatttgaaaattgtttttgggccttataacagatcttgttgttatgaagtttctgaaattttcttaaaagaagtaagtaataaatttagcaaagatttattaaatgcttcttttgttacaagagatggtaaaatatactttgataatgctagttttaatttaaatttactttctagttttaatttaaatatttataattcaaagctttgtacgtattgtttgaaaaatctttattcttatagaagattaagagaaagtcaaagttatgctttaatttggagaatt

SEQ ID NO: 311 - DNA, 1326 bp, Borrelia burgdorferi s.s.
gtgcgatttaattttattaagtttttatatataggaggatggattatgcatagttatattgtagaaggcggctataagataggtggtcaaattacagctagtgggaataagaacgctgctttaccctgtattttggctgctttacttaccgatgaagaggttattttagaaaatattcctaatattaatgatgtaaaagttgttttagatattttaaatgacataggagcagatattgcaagagagggaaatactttaaaaataaaagttttaaatattgtgaaaacagaaatagattcttcttttacagatttaattagggcttccatacttttattagggccttttgtttctaggtttggaaaaatagatatggcgcttccaggaggagatgtgattggaaagaggaggcttgatactcatttttacgggctttgcaagctgggggccaagttaagcacaaaagatagaaggattgttttaaaggctaacaagcttgttggcgctgaaatgtttttagatgaagcttctgttacagccacagaaaatatcattatggctgcagttcttgctgaaggaaatactgttattatgaacgctgcttgtgagccacatgttcaagatttgtgtaatatgttaaattcaatgggcgctaatattttaggaattggttcaaatgttttagaaataaaaggtgtaaaaaaattaagtgggaccgtatttagaataggagccgatttcatgcaagttggttctttaattagccttgctgcattaacagggggtgagttggaaattaaaaaagcagatccccaacatttcagattaattaggcatgtatattcaagacttggcattaattttgaatatgacagggaaaatgtatatgtaagaaataaacaagaattaaaagttaagttagattttggtgggcacattccaaaaattgatgatggcccatggccagcctttccaacagaccttatgagtattattgtagttactgcaacgcaagtagaaggcacagttttagtttttgagaagatgtttgaatctaggatgttttttgtagataaattaataaaaatgggtgctcgaattgtgctttgtgatccacaccgcgtagtagttacgggcaaatcttctcttaaaggcaatgttttgtcttctccggatgtacgagcgggaatgtctcttcttattgctgcttttgttgctgaaggtcgcagcgagattcaaaatgtttatcaaattgaaagaggatacgaagatgtagttaacaaattgattaatttgggtgcaaaaatcaagaaagttaaaagtcaa

SEQ ID NO: 312 - DNA, 627 bp, Borrelia burgdorferi s.s.
atggaaagaaaagttttttctaaagatgggaaagagattggaactataaatttggatgatagagtttttaatatagaaattagtcatgggtctatttataatgctataaaaaacgagttgtctaatcttagggttggaacatcttcaactaaaaccagatcagaggttaggggtagttctaaaaagccttggaagcaaaaaggaaccggtagagctagggttggtacaaagcgaaatccagtttggattggcggaggtatagcattagggccaaagcctagggattatagctatagattgcctaaaaaggtaaaaaagcttgcatttaagtctgtattaagtttgcgtgctgctgatgaaaatagttttaaagttattgagaattttaatgttgaatctggaaaaacgaaagatcttgctttaataataaaaaattttgcaagttttaatggtaaggtggttattcttttgggcaatgatgatcagatgataaaaagggctggtaaaaatataagagatttaaagattttatcttttgataaacttagggttgttgatttattttatgctaagaatttaatagctctagaatccgctgttaacaagctcaatgagttttacattaaa

SEQ ID NO: 313 - DNA, 6498 bp, Borrelia burgdorferi s.s.
atgatagattttgcgactattttagttaacctttttttggtttcaatagttttatttgtttataggcaatacgataaacgttctagagcattagataaaattaaaaagttcgttgatcttacaaaggttaatcttgaagattttattgaagataagacaaaagagattaatgatcttgctgttgatatggaagcttatcaaagatctagtatagaaataataaaaaagattgaggaagttcagcaaaagattaaaaataaaagcaatgattttgcagaggttgaaaaaaagatagcctatcatgattctatgcttaaggatcttgatgaaatgacttttaaagttcaagagaatatacaaagattgcaagttgatgggaaaatagtagataaactttcaaaaactttaaaaggatttaatactcagattgattcggttgaatcaaatttgaattcagtgttagaaaaatttgacaaggctaataaagaaaatctcgagtctattaaaattgctagttgggaaaagtttgacactaatattaaggaacttgtttttaaaatagataatttaaataaagagattagtctttatgaaaaagatttagcaaatattgaagagagaaaaaatgatattttagttaagggtaatgagaaattagatttagaatttagcgattttcttgaaaaggtcgaatttaatattggcaaatacagcaaagagattgaaagttcttttaatttttatgaaaacaaatataagttaatagaaaattctatagagcttattatggagagtgtgaagaataaaattaatgaaaaagaagattttattttaaatagactgaatgaagaattgcaaaataaatttaaggatatcttagtatatgttgatgatcgctctaaggaaattaaagataagcttgaagataaattggttttggtggacaatgaaatttcttctatgagttcttcctttaaagacaatgtttattcaagaattaattcacttgaggagtcaatgcgaatagagatgggaaagtatgaagagcaagttgatgatgtttttgataaatttagatctcaagttgagttgaatcttaaaaatatttatgaggattatgaagataaaataagtcaagttgataataacattagagaaagggtagagcttagtttgttagatttgaattctaaaatggaaagtgttcagtctggtgctattgattttataaagaggcttgaagatgattctaatggaatatatcttgaatttaaaggtaagtttggggcagatattgaagtttttagtgaaagttttaaaggtgatattaatcaacttaagatgcagttagaatcccaactcttagatgttgattcaaatattcaagaaaagcttattaagcttaatgataatttgatttctaattttgaagaaattaatggtaggtttaataataattactcaaatttaaatgataatataaatgccaagtacacagctctttttgaatctttggattctagcagctctaaatttgaaaatcaaatggaatctaaatataagagctttacagataaattaacagcaggaatggatgaattttctttaatgtatggtgagaaatttgagacactctctcaagaggcgactaataattatcaagaatttcaagatttaaacaaaaaattagaaaatgaaattgaatctttttataatatgtttgaaaaaacccaagagactttaaaggtagattttaatactagtttaattaatattaaagatgaaattggtaaaaatatagtagagtttagggatcgttattacgatgaggtaaatatttttgttactcagctagaagaaagcaagcttcaatattcaaagtggcaaggtgaaatggattctaatttaaagaatattgaatctcaaataaataaaacaaatgaagaatttttaagtttaattcagattcaaaaagacaaaggaatagagcttagtgagagcgtttttaatgatctgtcagatcatattcaaaaaaaagctattgatatgcatggcagttggaaagatgagcttattgctttaaataaatctttgcttgatattaaggtttctagtgaagagctactttcatctgctactttaaaaatagaaagtttagaaaaagatgttaacgatagaatggaatatgttttattaaaaacaggcgatattgagagtttagtgatagaaaaatacaaagaattaaaagatatgtcatattcacaaagtgatgaggctatattaggaattaaagagtttattaatagacaaacagaaataattaaagataaaagcgtgtttatgcttgaggatttgaataaaaaatttgatgataagaataattttgttataagcaagattgaagaatgtgattataaattaaaagatttcaagattgaatcagaagatattttaaataattttaagtctgatcttaatgaatttattgagtcaaaactacaaattgtctctaatataaaatcggataatcaaaagcaaattgatgattttttagatagaatttctaaagatattttaaacaggaaagattcaattaacaatgaagtagatagcaagcttagtgattggcaaagtaaattaaatgaaataactgttaaaattgaaaatttattgtcttcaggtaaagttgatctggatttaatagattctgaggtgactacaaaaattaaagagcttaaattttctatagaaagccttgagagttattatcttgagaaaatagatgagtttagaaatcaaggtgccatatactctgatgagcttttgcaagacataatgaaccattttaataaagagactagagaacttgaagaaaatttatcaaaaaaatttgctgcggttttaaataattcagaggaatttgttaaagaggttgatagtttattgcaggacaaaagaaccgatattgcttcttttcaggctaacatagatattactcttgattctcttaatgtgaagtttaatgatataaacaaagaaattaatggaaaatacaatgaggtgatatctaattatagggggtattcagagaatatttctagtaaacttgaaaatgaaataatgcatgagattgaaaatctaagcagaagattgacagatagaatagatagtcttagtaaaggtatggatgaaaatcttcaaaaacttaaggaatcttttgatgtatcaaaatatcaagttgaaaaatttgaattgaaagttaaagatttaacagatgatggagaagcaaaaattaacaagcttgttaaagagatcgaacagtattataaatctagattagaagaagcaattgattatagaagaacgattgataacgatattatgcaagcaaaagagagatttggggagataacaaatgagcttaaaaataatattgagagtaagtctgagtttttaaacgatctttataaggaaagatttaaacttattgagagtaattttgaagagagatattctacatttttaattgaaagcgagggagctatttcaaaaattagagatgaaatctataaaacacttacaagtaatgatgaaaatttgcaaattaagatttctgaaatggatcaaaattttgagataatagagcaaagatcaaaagatattttagaatttgaaaaagaattgcaagataaaattaaagattgttacggttttataaattctcaatttggagagattaaggcaggtgttgaagagaatataaaaaatcattttgatgtttgtataaaaaaggtaaataccttgattgatgatgacattgtaaagtatgaaaatgaaattcacaagagaattgattctttaaaatcgattgagagtacttttgatagcatagagaaaaatttaaatgataaggtgagtgggtgtattgataaaatagctaatgattttaatcttaagtatattgaacttgaagaaaggtgtaatgaagggcaattaaatttagagaataaaattgacaacaaaattaaagccattgataatttagctttaagtcaatatgatggacttgagaaaaagtatgctgatatgtacgatgagttttcagagagattaaattcttatattgcaactttaagtgaagagtttaagagttcaaataaagagatgatttttgaacttgaatctcaactgaaaaatcttaaaaatcttgaatctgatttaaataatgttgaaaaggatgttattagattaaaagaagagtcttatcacaatgtttcatcacatcttaaattattagaagaagacttttttaaagatttaaaaattagaggcgaagagcttaaatattctttagaaaactttattgcctcatataatgataaaattcaaaatttagaatatgatttgtctaaaaatttggaaaacaaaacagaacttattcaaagtttccgtttagatattgaacaaaaaatgaaagatgataaagagaatttttatttagattttactaaagaattttcttctaaaaaaaaagatatgcagagcgagatagctttaatggaaaccaatattaccggaaaagtagatgaatttgttgattttgtaaataataagcaaagtattattgattcttggtttttgaatattaaagatgatgtaaaagattggcaagaaaaatcttatagcacaatagagaagagaataaatcttgctgagcttggaattaaatcatttgagaatgatatttttaatgttaagattggtttagaatcttttaaagatggttttgagattaaggctgaggagatttttagcaatttgcaaaacgaggctaaaaaaattgaacaatcagttcatcttgattttaaaaatattggcgaatcattaaatcttaaagttttagatcttgaaaaatttgttgattttaaattagaaaagatagatgaaaaggttaataaaaaaacagaagacatcttaattcaagcagaagtgaaatttttaactcagcaaaaggatcttgaagataagatctttgagcttaatcagaaattagagcatgaatttacaaccttgtcttctaatcttgataaagtaaggcgggaaatggttgatgtaatttctagtgataaagaaagctttgaagggcaaattgaattaattaataaaaatatttcagaattttctgagaaaattagtttatacagaaataatattgagacatcaattgagaatgaatataattcgttttctaaatctataaaatcagatctcggcttacttgaagatgagcttaaaaaaagtttaaaacattcaacatcagagattgaaaccataaagagtggtttgcaagaacaaattgataaatttgaggttgaatttaagaaaaatcataaagaattattaaaagaagttgataataatattttagaacttgaatctaaaatattaaattgtgatgttcaatttaacaaatttattagtgagattaaagacaatttagttgaatacaaatctgatttgagagcagaatttgaagatagttatgataaaataaattttcaaatcgaaaatcaaattgaaaattttaaaaaattagattctgaacttgaaaagaataattcaatatttttggaggcttattctcttaaggacaagttggaaaaattatgggaaactttaaaaaatgagatagggcttgctcaggaatataaaaataattttgaaaacgttaacaaagaattttataatattcaaaaagaaacattgggtattattgaaatttttaatgagctaaagttagaacaagaatcaattaaatctattaaaaatgattttaatagattttttgaattttactcttcatttgatagtagatataagagtttaattgaatcttatgatgaaatgcagatatataaagctaaaataaaagagatagctgacgagcagagaactattcttgataattatgaaagaattagcaataaagagagcatattaaagagtactatagagtctgttgataaaaattttgatttaataaatgaagtggagaaaagatttaataatttaagcaaagagagtgctaagattcaagacaatctcaaggatatggaaaatgttgtttcaagtctcttattaaacaaagggttgtcagaagaagtgttgattaatgctcaaaatttaaaggaaatgctattagatattgaaaataagttgaaaaatactttgactatgagagagagggtggtgaaatctgagacaaggttggagaatttaaatattgcagcagaagagagaataaaaactcttggtattcttgtcaaaactgattctaaatatcaagataatgttggtcttaataatgaaactgttaggaattctgtaataaaattaatgaggcagggatggagtgctgaagaaatttctagagctaccaaattatctattggggaagttgagcttattttagagcttggtataagtaataaaggtgat

SEQ ID NO: 314 - DNA, 1905 bp, Borrelia burgdorferi s.s.
atgggcaaaataataggtattgacctaggaacaacaaactcatgcgtagctataatggagcatggaaaaccagttgtaatacaaaattcagaagggggaagaactactccatctattgttgcttacacaaataaaggcgaaagacttgtggggcaagttgcaaaaaaccaaatggttacaaaccctgaaaacacaatttattctattaaaagatttatgggaagaagatttgaagaggttgcaagcgaaataaaaatggttccttataaaatagaaaaaggactaaatggcgatgcgcgagtaaacatttcaaatataaaaaagcaaatgtcaccgcctgagatctcagcagcaactcttacaaaaatgaaagaaacagcagaggcttatttaggtgaaaaagttacagaggctgttatcacagttcctgcttactttaatgatgctcaaagacaagccacaaaagatgctggaaaaatagcaggtcttgaggtaaaaagaattgttaacgagccaactgctgctgctcttgcttatggaattgaaaaaaaacacgaagagatcgttgctgtttacgatcttggtgggggaacatttgacatttcaatattggaacttggagatggtgtttttgaagtaaagtcaaccaacggagacacacatcttggtggtgacaattttgacgacgaaataataaaacatttaatttcagaattcaaaaaagaaagcgctattgatttatcaaacgacaaaatggctcttcaaagactcaaagaagcagctgaaaaagctaaaatagaactctcaggcgctcaagaagcttcaataaatcttccatttattacagcagatgcaaatggtccaaaacacttacaatatactctaacaagagcaaaattcgaacaaatggtagaccacttagttcaaaaaacaaaagaaccatgccttaaggctattaaagatgctgggcttaaagcttctgatattaatgaagtaatacttgtaggtggatcaacaagaattcctgctattcaaaaaattgtaaaagatatatttggacaagatcctaacaaaggagtaaatccagatgaagctgtagcaattggagctgctattcagggtggcattctaacaggagaaactaaagacatggtactccttgacgttactccactctcactaggaatagaaacactaggcggggttatgactaaacttattgaacgaaacaccacaattcctacaaaaaaaagtcaagtattctcaacagctgctgacaatcaaacctctgttgatattaaagtccttcaaggtgaacgtgaaatggcagcacaaaacagaatacttggtaattttatacttgatggaataccagcagcaccaagaggagtgcctcaaattgaagttagctttgacattgatgctaatggaatagttcatgtgtctgcaaaagatatgggaacgggcaaagaacaaaaaattagaattgaatcatcatcaggactctctgaatcagaaatagatcgaatggtaaaagatgcagaagctcatgcggaagaagataaaaaattaaaagaaaatattgaagcaaaaaatacagctaattctttaatttatcaaacagaaaaatcattaaaagaatattctgaaaaaatttcaagcgaagacaaagaagctattgaaagtaaaataaaagaattaaaagaaagtcttgaaaaagaagacatttcacttataaaatctagaacagaagaacttcaaaaagcttcttacaaaatagctgagatgatgtataaagattcttcccagcaaaatgcaaacagccaacaagaaaatggcccacaaagcaatacaagcgaagagggtaaagaggctgattatgaggttgttgacgaggataaaaaa

SEQ ID NO: 315 - DNA, 561 bp, Borrelia burgdorferi s.s.
atggaaaaaaaagaaactaaaagcgaatctgaaaaaaccaacaaacaagataataaaaatacaaaatctcaaaaaaaagaaaacttaaatttagtaaattctgataaaaaaattgctgaacttgaaaatgaaatctccaatcttaaagatttgtatttaagaaaacaagcagaatttgaaaacttcagaaaaagattagaaaaagaaaaagacaattttgttaaatttgcaaatgaaaccataatgaaagatgtcgttaattttcttgataacttagaacgagctattaactcttcaaaaaaatctaaagattttgataacttattaacaggaatcagtatgattgaaaatgaaatactatcaatctttgataaaaaatataatttaaaaaaatttggagaaaatggcgagaactttgatccaagtcgtcatgaagcaataagcattgaagagaaagagggtcttaaaaatccagaaatagtagaagtataccaaaaaggatattgctacaacgacagaatattaagaacagcgaaagttaaagttgctcaaagcaaaaat

SEQ ID NO: 316 - DNA, 858 bp, Borrelia burgdorferi s.s.
atgaaagatttgaatgaaaacaatgataataataaaggattttttgtagcattaacatcaattgcaacagtttgtatcataatatttcttgggacaattattttctttccaaacaaaaatttggcttcagacattgcagaaaaaaatattgttttagaagaagataaagatccaaacaccttagaaaaggttgaccaaaatgaaaaatctttaaaggtatctgaaactcaaaatgaaataattatagatttaacacaagatttaaataaagaaaaaaaacctacaaacaaaatacctaatactcagaaatcaaaaatcatcgaaaagcctcaacccacaactcaaaaaatatctaatacttctcagaaatcaaaaaccatcgaaaagcctcaacccacaactcaaaaaatatctaatacttctcagaaatcaaaaaccatcgaaaagcctcaacccacaactcaaaaaatatctaatacttctcagaaatcaaaaaccatcgaaaagcctcaacccacaactcaaaaaatatctaatacttctcagaaatcaaaaaccatcgaaaagcctcaacccatagcccaaaaaactttaaatactgataacatttatgatcctaatatagaatattacatacaatttgtatcactctcagacccaatcaatgcagacaactatattcaaaaattactcaaatataatataattgctagaatatattctgcaacagtagataataaagatatttacagagtaagatctggtccttataaaacaaaatcagaagcaaaagcagactttaaaaaaatagcaggaataggtgaatttaaagaaacttatatattacccgttaacaaa

SEQ ID NO: 317 - DNA, 1491 bp, Borrelia burgdorferi s.s.
atgaataaaacaaaaaatcgaagccttacgtattttataatactttcatgtatatcattatttggggctaataataatacaataagctactctagcattgaaattcctctagaagacttaagtgaagaatttaaaagttctgggaataaaagcgatcaaataaatacctcaaaacatttaaacaaaaacatagtttcttatgaagacccaaaaaagggtaaagatctaaaattgccagaaaatataagagacaaaaaactaccccaaaaaagaatggacgaaaatgatctaaaatctgtaattgaaaattatgaaaataaaattaaaaacatagaaaagcttttaaaaaccaaaaatcaaaaaacatcggaaaatgaaaataaaaaaatagaatcaatcgaaaaaaaagcaaaaaaatatgaaattttaaccaataaattaaaaaacgaaatagtagaaataaaaaagctccttaacaaaaaaatcaagcctaaagaagatgaaaattacgaaaaaataaatattgaaaacattgaagaagaaactgatgatgattttgaagacaattatgaatataatgatgaaattgaagmaacaaatgaggacaattacccttctaatgaaggaataataaacaatctaaaagaaaatcttaatgaaaacgaaaaatattatgctattaatgaaaaaaaaatcgatgaacttgaagacagaatcaacgagaatgaaaacactattttagacttgcaaagagaattaaggaattttaaaaaaaaagataactcagataaaaacttagaagaaattgaggaaaatttatcttcaataggaagaataattaatgatctaaaaagaaaaatcagcgcaaatgaagcaataaacaaagaaaatcaaaaaaaaataagaactgataaacacaaactcaaagaattagaagataaaataaaggaaaatgaagagactattttaaaacttcaaaaagaattaaacaattttaaaaaaaaagaaatttatcaaaaacccttaaatgaagaaactttcactccaagcattacaagtaaaaatgacgacttagaagaaaataagaaattaaaaaaggaatatttaaagcccatagaaaaaaaagaaagccgagatctagaagaaaatactaaaagcaccccaaaaacaactatgataaaaacagcagattttcaaatctaccctgacatatatcttaataattataaatttaaagaaaagggagatcaatttgcatttaaaaaagaaaacacatactatattgaaatagatcccactaacaatttaaatgaggctttaaaaaatcatgaaataatctcaaaatataaatttgaaaaatatttcattaaccctattctaaaaaataaagaagaattttttagaaacttaatagaagtcaaaaatatccacgaactaggaattatgtataaaaatctaaagcctgaatttaagcaaataaaaataattaaa

SEQ ID NO: 318 - DNA, 1950 bp, Borrelia burgdorferi s.s.
ttgattctaattttctattttaaacaaattgctttatttattatttttagattatgttatattataaaaaaagtaaagattaaattgaaaaggaaaagttgcatgaaaaaacaatttgatacagaagtaaatgatttgctttatttaatcatccactctctttactcccataaagaaatatttttaagagaattgatatcaaatgcgtctgacgccattgataaactcaagtttttaagcttgacaaacgaaaaattcaaaaacattgctctagaaccaaaaatagaaatatcgtttgatgataaaagcatcctaattaaagataatggaatcggaatggatgaacaagatttaactaatcatcttggcgtaattgcaaaatcaggaactaaagaatttattaacaatttaaaacaagatgaaaaaaaatctgcaagcctaattggccagtttggagttggattttacagcgcattcatagtatcagaaaaagtagaagttacatcaaaaaaagcattagaaagcgacgcatatatttggtctagcgacggcaaaacaggatatgaaatagaaaaagcaaaaaaagaagagtcaggtacagaaataaagttatatcttaataaagaaggccttgaatatgctaataaatggaaaattcaagaaattatcaaaaaatattcaaatcacataaattatcccatttatattaaatacagcgaacctataatgaaggacgggaaacaagagggaatagaagaaaaagaagaaaaattaaatgaaactactgctctttggacaaaaaataaaagcgaaattaaagcagaagaatacaatgaattttataaaaatacaacctttgattatgaaaatccattaatgcatattcatacaaaagccgaaggaaatttggaatatactaatttattttacgtcccaagcaaagctccctatgatttatattacccaaacactaagcctggggtaaagctatttataaatagaatctttattacagattctgaaggcagcttgcttccaaactatctaagatttataaaaggaattatagactgccaagatttgccactcaatgtaagtagagaaattttacagcaaaataaaattttgtctaaaataaaatcatcttctgtaaaaaaaatactaagcgagcttgaaaagctaagtaaaaaaaatcctgaaaaattttcagagttttctaaagaatttgggagatgcattaaagaaggtgtttattctgactttgaaaacagagaaaagcttatatcattaataaggtttaaatcctcaagtgtagatgggtttgtgtcttttaaagagtataaagaaagaatgaatgagagtcaaaaaagcatttactacataacaggcggtaaagaaaatatattaaaagaaaacccaatagtagctgcttataaagaaaaaggatttgaaatcttaatcatggacgatgaactcgatgaagctattttaaatctaattccagaatacgaaggattaaaactaaaggcaataaataaaaacgaaaccagcaatgaattaaaagatgaaaatttcaaaaaaattgaagaagaattcaaagatacccttacaaaagtaaaagaaatcctcaaggatcatataaaagaagtcaatctatcagcaacattgataaaagagccttcagcaataataattgatagcaatgatccaacttaccaaatgcaaaaaatcatgctgtcaatgggacaagaagtaaaagaaataaaaccaatacttgaattaaaccctaataataaaatagtccaaaatttaaaaaatctagagcctgaaaaattagaaaaaataagcattctcctttttgaagaagctatgttaacttcaggaatgcccagcaaaaatccaggaaaatttataaatataataaacgaatttatagaaaaagacttctta

SEQ ID NO: 319 - DNA, 687 bp, Borrelia burgdorferi s.s.
atgcttgaaataataagtcttggaggaggagtaataaattcaaaccaaatcaacatagaattcattaaaaactttaaaaactttgtttttaaatggctactagaaaatgaaaaaagaaaaatcattttaatagttggtggaggaagagttgcaagagaataccaagatgcttataaaaaaatcaatcctgattttaaagttcatgaacttgatgagattggaataatatcaacaagactaaacgcagaatttctgagtaaagtaatgaatcccttttgtaaagacaaaattgtcactaatcccttaaaaaatttttcttttaaaggaaaaatattaattgcttccggatggaaatcaggattctcaacagattacattgccgtaaaatttgcagaaaaatttaataaaaaagatatcataaatataacaaacgtaaatcaagtttatgataaagacccaaaaaaatttaaaaacgcaacagcttttaaaaaattaaattggaaacaattacaaaacattgtgggccaaaagtggaatccaggcttaaatttaccttttgacccaatagcaacaaaactctcttcaaaacttggacttaccctttacatagtaaatggaaataatattgaaaacttagaaaaagtttttaacaaaaataatgatttttttggcactattatagtaaaa

SEQ ID NO: 320 - DNA, 3483 bp, Borrelia burgdorferi s.s.
ttgttaaaaatcaagttttattttgataaaataattttaggtatgagttttaggtctaggtttattcatcttcatgttcattcagattattctcttttggatggagctgcaaaaatatcagatattatatcaaaagcaaaaaaatgcaatatgtcgcatattgcattaacagatcatggcaatctttttggagctattaaattttacaaagaagctaaaaaagcaggaattaagccaataattggcattgaagcctatatggcaaaaacttctaagtttttaaaaaaacaggatgatcttggaaaaatgtcttaccatttaattttgcttgccaagaatgagttgggttataaaaacctattaaagttaacaagtatttcttatcttgaagggttttattatcgtccaaggatagataaagatgaccttgaaaaatattcagaaggtttgatttgtacttcagcttgcattggggggctcattccaagacttattttggccaatagatttgaagatgccaagaatgaaattctttggtttaaaaaagtttttggcaatgatttttatcttgagcttcaaaggcatggtattaaagatcaagacattgtaaatgaaaggctggttaagtattctagagaacttggagttcctttaacagcagctaatgattctcattatgttaacagagaagatgcaactgctcaagacatcattgtttgtattggtactggtgctaagaaaagcgatgagaatagattaaaaatggaaaccaatgaattttatattaaatctcaagaggaaatgtgtgaactttttaatgatttgcccgaagctttagaaaatactgtaaggattgcagaaaagtgtgatgactttaaaataacttttccaggtcctattttgcctgattatcaaattcctgttgaatttaatactcttggtgaatatttggaacatctcacacttgaggggttgaaatttagatataaaaatttgacaagcaaaataaaagatagagctttttatgaattgagcgtaataattggaatgggctttgaaggctattttttgattgtttgggattttattaaatttgctcatgataacgatattcctgttggagctgggcgtggttctggtgctggttcaattgtggcttatgctcttaggattactgatattgatcctttaaagtataatttgctttttgagagatttttaaatcctgagcgtatttctatgcctgattttgatattgatttttgttttgaaggcagagatgagattataaaatatgttaccaacaaatatggagaagataaggtagctcaaataattacttttggaaccttaaagcctaaggctgtagttaaggatgtggctagggttttagatattccatttgctgaatcaaatgaacttactaagtttattcctgatggtcctaaagtttctttaaaagaggttttagatgacaattctttgaaagagtgttttactagcaagcctgtttataaagaattaatgaatgccgcattggttcttgagggaatgaatagacatgcttcaactcatgctgcaggaattgtgatttctaaaacccctttaaccgactatgtgcctctttataaggattataagcaaggttctgtttctactcaatacacaatggatttgcttgaagaatgtgggcttgttaagatggattttcttggtttgaaaacattgacgttaataaaaaatgcagaaaatcttattagaagtgtaaatccagattttaaaataaaaaatattccagataatgatgttaagacttttaatatgctaggagaaggaagaagtgcgtctgtttttcagtttgaatctgaaggaatgcagcaaattctaaaagacgcaaagcccgatagcattgaagatttaatagctttaaatgctctttataggccaggtcctatgcaatttattcctcaatttattgctgctaaaaaaggtgttaagagaattaaatatcctcatcccgatttaaaggaagttttaagaccaacttatggggttattgtttatcaagaacaagtaatggaagttgcaaaaataattggaggcttttctcttggcaaggccgatattttaagacgtgctatgggtaaaaagaaagaagacgagatgaatgaaatgaaagtcgacttcttaagaggcgctattgagaaaggatatgacaaagaaattgctagtgaaatttttgaacttttaaagcccttttctgggtatggatttaacaaatcgcatgcagcggcgtattctttaatagcatatcaaaccgcttatcttaaggctaattatcctgaatattttatggctgccaatttgaccaatgaaattaataataatgataagctttcttattacatcgaagagtcaaaagctataggcataaacgttctcaagcccgatataaatcgatcatttagggaatttcgtgtaactgattctgggatttcttatgggcttaatgggattaaaaatcttggaggaattgttgttgatttaataattgatgagagagaaaaaaacggcaaatatagttcttttgaagattttataagacgtgtagatgataaagtaattaataagaaatttttagaatctgcaataaaatctggactttttgatagtttggatcaaaatagaaaaactttatttgaaaatcttgatcatttgattgaagttgtttcagaagataaaaataataaaaaacttggtcaaaacagcttatttggtgctcttgaaagtcaagatccaattcagcaaagttttaattatcaaacttttaaagagtattcttattctgagcttttaggatttgaaaaagagcttttaggattttatgtgtcgggtcatcctcttgatccttataaaaaggcaattgacagtttttccagtttaaatgttttaacagatcttgctgccaaaaaagatagcattgttcaattttctggaattttaaattcagtaaaagttattcaaactaaaagaaataatgcaaaaatggctttcggcgttatagaagattttaaaggcgcaatagatattgtagtttttacagaaagctatgaaagatatagaaattttttacttgaaggcaatgttattggggttgtaggtaggcttacgtttaacagagataaattttcaattgtggttgaaaaagttgtaaatattgagagactttccgaatataaaataaataatattcatattaagtttttaaataataaattaaatgacctacaattacttaattctttaaaggaaagtataagtaattttgaggacaattctggattttcaaatgtttatttttatttaagggaaaatggtaaagatttgaaattaaaaatgaattcaattttaaattttgtgccagatgaagataagcttgataagttgagaaagtgtgtgatagttgaagatgtttgggttgat

SEQ ID NO: 321 - DNA, 795 bp, Borrelia burgdorferi s.s.
atgaataattgtttaataaagttttttatttttttattagttttttcaaacagttatgttgctttttctaaaaatgtcaatgttttaatagtaactgctatggactctgagtttgatcagataaataagcttatgtctaataaggaagaaatagttcttaaggagtatggtcttaataaaaagattttaaaggggaagttgtctaatcgcaatgttatggttattatttgtggggttggtaaggttaatgctggtgtgtggactagctacattttgtcaaaatacaacataagtcatgtcattaattctggcgttgctggtggcgttgttagtgctaaatacaaagatattaaagtgggagatgtggtggtgtcttcagaggttgcatatcatgatgttgatttgactaaatttggatacaaggtaggacagcttacaggaggattgcctcaaaaatttaatgccaataaaaatttaattaagaatgccatagaggccattaaatcaaaggttggaggttctaatgcatattcaggattaatagtttcaggagatcagtttattgatccaacttatattaacaaaattataggaaactttaaagatgtaatagctgttgagatggaaggtgcagcaatagggcatgtttctcatatgtttaatataccttttatagttattaggtcaatatctgacattgtaaataaagaagggaatgaggttgaatatagtaaattttctaaaatagctgctttcaattcagccaaagttgtacaagaaattttaagaaaactt

SEQ ID NO: 322 - DNA, 1854 bp, Borrelia burgdorferi s.s.
atgaaaagccatattttatataaattaatcatatttttaaccacatctgcagcaatatttgcagcagacgcattaaaggaaaaagatatatttaaaataaacccatggatgccaacatttggatttgaaaacacaagtgaattcagattagatatggacgagcttgttcctgggtttgaaaacaaaagcaaaattaccattaagcttaaaccatttgaagctaatcccgaattaggcaaagacgatccattctcagcttacattaaggtagaagatcttgcactaaaagcggaaggcaaaaaaggcgatcaatttaaaattgacgtgggagatattacagcccaaatcaatatgtacgatttttttattaaaataagtactatgacagattttgactttaataaagagtctttatttagttttgcacctatgactggatttaaaagcacttactatggattcccaagcaatgatagggcagtaagagggacaattcttgcaagaggtacttctaaaaacataggaacaattcagctgggatacaaactcccaaaactcgaccttacatttgcaatagggggaacaggcacgggtaacagaaatcaagagaatgacaaagacactccatacaataaaacatatcaaggaatcctttatggaattcaagcaacatggaaaccaataaaaaatctacttgatcaaaacgaagatactaaatctgtaattgcagaaacaccttttgaattaaattttggcttgtcaggagcctatggaaacgagacattcaataattcatcaataacatactctttaaaagataaatccgtagttggcaacgatttattgagcccaactttatcaaattctgcaattttagcatcttttggagctaaatataagcttggattaacaaaaataaacgataaaaatacctatcttattttgcaaatgggaactgattttggaatagatccttttgcaagcgatttttctatatttggacacatctcaaaagcagcgaatttcaaaaaagaaacaccctcagatcctaacaaaaaagctgaaatatttgatccaaatggcaatgctcttaatttcagcaaaaacacagaattgggcattgcattttcaacaggagcaagtataggttttgcttggaataaagataccggtgaaaaagaatcctgggcgattaaaggatctgattcctacagtacaagactctttggagaacaagacaaaaaatctggagttgcattgggaataagctatggacaaaacctttacagatctaaagatacagaaaaaagattaaaaaccatatctgaaaatgcatttcaaagcttaaatgttgaaatttcaagctatgaagacaacaaaaaagggattataaatggattaggatggataacatctatcggtctttacgatattttaagacaaaaatctgtagaaaactatcctacaacaatttcaagcaccactgaaaacaatcaaactgaacaaagttcaacaagcacaaagaccacaacccctaatctgacatttgaagatgcaatgaaactcggcttggccttatatcttgattatgcaattccaatagcatccatttcaacagaagcatatgtagtaccttacattggagcatacattttaggaccttctaataaactctcaagcgatgctacaaaaatttatttaaaaacaggacttagccttgaaaaactaataagatttacaacaatttctcttggatgggattcaaataacattatagaacttgctaataaaaacacaaataatgctgctattggaagtgctttcttgcaattcaaaatagcctacagcggaagc

SEQ ID NO: 323 - DNA, 1428 bp, Borrelia burgdorferi s.s.
atgagtattgtaattgattcttttaaagagatatcaaaaattccaagatgttcaaaaaatattaaaggaattattaattttattaagcagagagccaaaaaatttggttattcttttaaagaagatcgtgttggtaatattgtagtgcagataaaatcaaataataatattgatatgcatcctattattttacaatctcatgttgatatggtttgcgaaaagaatgaatccagtttgcataattttgaaacagatccaattgaaattgttgaagaggatggatatcttaaagcagtagggaccaccctcggagctgataatgggattggagtagctatgatgttggggattatgagtgaagccaataattttcctcatcccgatttagaacttctatttaccgttgatgaagaaataggtttaataggtgctcttggtcttgattctaatttatgtagtggtaaaagcctcattaatcttgatggagaggaagagggttattttttagttggttgtgcgggatcaagacttgtagaaattgttttttctcctaagtatagccttgtaacgaaaaaaacaaaggtagaaattttgtttaaagggcttaaaggtggccattctggggcagatattcatttagatttggcaaattctttaaaattaatgttttttgctctttttgaaattaaggcaaatcttaattttgagattgaaggcatttttggtggaaatagtagcaatgcaattccaattgaagccaaggctttaatctttatagatgataatgattatgatttattaaataaagagcttaaactgttcgtacttaaagttaaaagtgcatattctcttgaagatgaatttgatattattgttaataaaagagaattttcatcagttaaagttcttgatgaaaatagcaaaaataagcttttaaatatgggaatgggatttttacatggagttcaaaaagtagaaaattatgaaaataagcttataaagacctctttaaatttttcaagtcttttgagaatgcaagacgattatatttttacttttttaataagatctttattggatttagacaaagagtatgtttgcaatcatttacaatcaataagtgatttgtcgggagctaatttgcgtgtaatttatgatgatccttcttggcagcctgataagaatagcaatcttttaaaacatcttcaagaagtgtataaagagatgtatcttgaagatgctaatgtttccacaatacatgcaggtcttgaaacaggcataatatcttctagattgggaggtatagaatctgttacccttgggccttggattgaatggcctcatactactagggaaagagtaaatatttcttcaactattagagtttatgattttttgaaaaaaagcttagaaagatttcaaaaattt

SEQ ID NO: 324 - DNA, 1290 bp, Borrelia burgdorferi s.s.
atggcaagagtaaaaggtcaaaaagtaaaagagtgttctttttgtggacttagtgtcgctgagcttggtggtaatgttgttatatctaatggggtagcgatttgtccggaatgttctaaaatatgtcacaatctttttaaagaaaagttgtgtaagccgctagattctaagtccaacggtttgccaactcccaaacaacttaaagatcatttagacatgtatgttgttgggcaagaagatgctaaaaaagtcttatctgtggctgtttataatcattataaaagaatattgaaaaataataaatatgacaatggtattgagattgaaaaatctaatatacttttggttggtcctacaggcagtggtaaaactttgcttgcaaaaacgttggctgcagagatgaatgtgccatttgcaatagcagatgctacaactttgacagaagcaggatatgttggcgaggatgtagaaaatattttgcttaaattgatacatgctgctcatggggatgttagcttagctgaaaaagggattatctatatagacgagatagataaaattgctaaaaaaaatgaaaacgtctcaataacaagagatgtttctggggaaggggttcaacaggctttgttaaagataattgaaggcacggttgccaatgttcctccaagaggcggtagaaagcatccttatgaggatactattgaaattaatactcaaaatatactctttatatgtggcggtgcttttgttgggcttgaaaacattgttaagaatcgaataaataaaagttctattgggttttcagcaattgaaaaaaagaatataagagaagatacttcattaaagtatttagaaatggaagatttgattaaatttggcttaataccagaatttgttggcagacttcctgtgcattcgtatcttgaaaagttgaataaagaagatttgttgagaatattggttgatcctcaaaattctattgttaagcagtattatcatatgtttaaaatggacaatgttgaattggtatttgaaaaagatgctttagaatcaattgtagatgaagccattttaaaaaatactggagcaagaggtcttagatctattttagagggtcttcttaaagatgttatgttcgaggttccttctattagtaaggctaagaaggttgttgttacaaaagaatctgttttaaatgcagatgttaacccattaattttagtgggaaatgcaattaaaaaaccttgggcaaaagagttatatgaaatcaatcttaaatatgataaaaaa

SEQ ID NO: 325 - DNA, 2439 bp, Borrelia burgdorferi s.s.
atgcaattaaaaaaccttgggcaaaagagttatatgaaatcaatcttaaatatgataaaaaatagaaaagaagatcttccaattgttattttaaaagaaaatgttctttttcccaatattacattgtgggtaacctttgataatgaatatgtaattaattccatagcgcaatccatgttagaggaaagattgattttatttgcttattcaaatgagcctaattgtgatgaatctgataggggagtagttaaaaacctatgctctgtgggtacttattctaaacttattcaggttataaagattagtaaagacgtaataaaagttttagttgagtgtcaaagtagggttcttatagacagtgtttctaaaaaaaatgattatttgagagctaaagttacttttgtgcctgattctagtggattaaacagagagctttttacctattctaaatttttaaaagaaacctatgaagcttatagaaattccttatctttaaaatcttatgatgcggataatgaaccaattaattattttgagaatccaagtaagcttgtcgatattatagcttctaattcaaatttggaaaatagcataaaattagaacttttacaagagctaaatgttaaaaccagaatagaaaagttgattgttaatttaagcattgaaattgatcttttagatcttaaaaaagatattaattctaaagttagagctaagttggataaggggcaaagggattattttctttctgaacaagttaaagagatacaaaaaagattaggtaaagatgaaaacgattatattgatagattaaactctaaagatattccagaagatgttaaatctaagattgaaaaagaaatttctagattgtctaaaatgcagatgaattcacctgatgctaatattattagaagttatatagaattaatattagatcttccatggaatgaaaatactgttatgaaaaatcatttaagcgagattgaatttatcttaagaaattctcattatggtatggatgaagcaaaagaaaagataataaattttttggctgtttatcagattaattctaaggtcaaagctcctattttatgtcttgtggggcctcctggtattggcaaaacatctcttgtggagtctattgcaagatcactgtctagagaatttgttaaaatatctcttggtggcttaagagatgaggcagaaattagggggcatagaagaacttatgttggttctcttccgggtgtttttattagcgcaatgaaaagatcaggtaaatccaatcccgttattcttcttgatgaaatagataaaattaatagtagttataagggaaatcccgaatctgcccttttggaagttttagatccggagcaaaattataagtttatagatcattatttagaaattccttatgatctttccaatgttttatttgttacaacagccaattctcttaatggtatgtcaaagccgcttttagatagaatggaaataattaaggttgagggttattcttatattgaaaagttagagattgctaagatttttctgattccaagcataattaaagagagttttttggacaaagtttatataagaatagaagatgatgttatttttaatttgattagaaactatactatggaatctggtgtaagggggctaaagagagttttgactaatttgattaggagacttgtaagggagctgctttatgagtattctaaagatcaaatcatcaaaggcaacttttattcaccaagttctttgatacatgggaataattcgctttttactcatgatcctgatattccaggtatttataaaataatcaatattaataattattataattatgttgatactgaggataacttggatttaattaagattgattcttcggggtttgtttatgggcttgcttggacaaattatggtggtacagttcttcctgttgaggcaactaagtttgagaaaaagggagacattattctaacaggtagtcttggagctattatgaaagagagtgcacagcttgcatattctatagttaagacctattcttctaagcttaattttgatgtgaaggaaagtcctgaaattcatttgcactttccagaaggagcaacaccaaaagatgggccttctgcaggtattaccattgcaacggcaattgcttcgatattgtctgacaagaaagttcctttggatcttgcaatgactggtgaggtgactttaaagggctttgttcttcctgtgggcggcattaaagaaaaagttttagcagcctatagaaacggtataagtaaagttattttgcccaaagataataaaaaagattattctaagcttccagaagaagttaaggacaatatagatgttaagtttgtctccagcttggaagaagtttttgattatttgaatattatt

SEQ ID NO: 326 - DNA, 2091 bp, Borrelia burgdorferi s.s.
atgattacattgttcaaaatactggcattaaggaaaagtaaaactttttgtattttgcaaattatagatcttattatattattttattttttaataataggtcctgtaaatcttaatgccgattttgagtataaggttgtcaagggagatactcttttttcaattgcaattaaatataaagtcaaagtaagcgatcttaaaaggattaataaacttaatgttgacaatattaaggcgggtcaaatattaattattccaagtgattctaatttaggtcaaaacattacccacaaagtcaatcattcttttagtttgctagaatctagtaaagggggagttttttacaccgcaaaagaaggcgacaccattgagagcatctcaaagcttgttggactaagtcaagaagagataattgcttggaatgatttgcgttctaaagatcttaaggttggaatgaagcttgtattaaccgagcctgattttttaaagccttatatggttaggaaaggtgattcactttcaaaactttctcaggattttgatattagttctaaggatattttaaaatttaattttcttaatgatgataaattaaagattggccagcaactttttttaaagaaagccactaagaatgttaattttcattatgttaaaagaggggaaactcttggcagaatagcttatatttatggcgttactgctaaggatcttgtagcccttaatggcaatcgggctattaatcttaaagcaggttcattgttaaatgttttaaagattgtaaataatgatttagaaaaacctgttgagagagatttaaaaattgagaaaaaaatagataataagtttatctatcattcagttgctgtaggggagactttgtatagcattgccagacattacggtgttttaatcgaggatcttaaaaattggaataatttaagcagcaataatattatgcacgatcaaaaattgaaaatttttgataaaaaactttcaattgattcttctataattaaaactaaaaacgatttatatattaaaaaaaaggttgattctggctctaattcttctaataaagtgcaaacaatagttaatcttccctcaagtaaaaataaaaaactaaatttaaatacttttggaattactgccaatcaagatctttttgatattagctctttggttattttagactccaaaataccaatatttgaggttgttggtgatttctattattggtatagaccaagaaagataagtcagccaagtgagttttattcagaagattggcattctcctttgaattcttataaaaaggcaacccagcttttcaaaagttttgaaaagttggtaaattctaggtttaataaaggatcaagacttaaggataaattaataattcttgatccaggtcacggtggtcttgatcctggagctattgttaaatctagagatggtcttggaaatgaagtttttgttgttgaagatgaatatgtatatgatattgccttaaggctttatgtataccttaaagaagagggggccaatgttgaatttactattttagcccccgaccatttaattagaaatagtgtttttgctaacaatacttttgttaatgttaaaaacgaggtttacaatgattatgatctaaataaaaatgatactgttgattcttggataagcggcactccatcaggccttaaaaaaagattagtcgttgttaaaaacattgttaataaatataaacatattaaagataaggatatagccttttttagtttgcatgcggataatagtgttggagcgcctaagagtatggggttttattatcaaaaagatgacgataaaaaatatgatattcattcaaagtctgcagcagaaaaaattacagaaggaatgaaaagaagtttttatattaagggtcaaaatcttcatgttttaagaaataatatagtaatgactaagcttttagtagaagttagaaatttggcatttccagaggaagcttgggctattagatcttctaagcttagagatcaagattctaaaattcttgctaatgggattttaaaaatattggaaaataat

SEQ ID NO: 327 - DNA, 1686 bp, Borrelia burgdorferi s.s.
atgtttagaaaactaaaaaaattgaaaacttatattattattatttcaataactaaattttcagaagataacctgttattaataatatcaaatataaaatatttgattgaacacaaacagctagcttacaaaatacattggacatttccaatatacttttttgaaattctaagagaacatgaggaattaaataaatggctatttgaaagattcaaaaccaatacagatatatatatgcctggaacttacagtggaagccctcatgaatacatgctacacgatgaaatacatttagatttgtattgggcactaaaaaatccattcaaaagtggatacaaagacatatttcaaaatacgcctattatgttttatatatacaacatagaaaagtttagaaaaaaggtgactgagctttacagaaagcttaatttcaattatacagaaggaataaggcagagtaaaaataataaaaattatttaattttttataaaaataactgccaatatttatatgaagtacaaaaaatagattctccaaaaagcaacgtagaaactcttatttatttttatgagatcaaagaaacttatgataatcaagaactaaaaaattttttactttatttaaaagccctagaaaacaacttacacagcattaaaatacaaaatctagaaggatccaaacttaccaccgaactactagagattccaaaatttaactcccttaaagagcaagagccaataataaattttcaaaacaaaagactcaaagattatcaaatcaacgaaaaaagcttaagagaatttttaataaataaacaccaagatgaaatcattaaaaattcagaatcaattgtgcctaaaaatttagaatacaatatggaaggaaatttcacgctatctcacgatcaatacaacatcaaattcgaaaatggaaaattaaataaaataaaatttaaagataaaaaagttgaatttttaaacacatctagaacctattttaaagtttcatcaaaaaaagaactaataaaagaagcatctattgaaagttcattttcattctcaaatgaaaaaattttaggaataaaacaatatttagcttttaactctgccaaaaaatcaacaattgatttttttatagatgagactatctctagcttctttatatcgattaaaataaaatggccttctaaaatagatctagataaaaaaacattaaaaaaatgcaatcctgattatcttcttgaatattcagctcttgaaatacctgtttttgaaattacaaaaggcactaatttaaaaataacagcaaaatacagcgatcttgatacttatgaaaaaataataataactaaaaacaatcccaaaggctacattaatggcacagaatttttgatatctaaaggaaatgataaaaacagcaacttttttataagctttttaaatgttgaaaaacatatcattcatacaattaattataaaattgaaaaaataaattctaagaaatggttaattttaaatatagggggttcttataacacagttaagatccaagatgtaataaattactctcaaacactaaatttaatgatactaccattaaataataattttgataacaaaataaaactgaattcaaaaataaaaaatttaattttttatactaatataaaaaaatatgaaaataaa

SEQ ID NO: 328 - DNA, 1635 bp, Borrelia burgdorferi s.s.
atggctaaagacatatattttaatgaggatgctagaaaaagcttacttagtggcgttgaaaaattatccaatgctgtaaaagtaactcttgggccaaaagggagaaatgtccttattgataaaaagttcggctctccaacggttacaaaggatggggttagcgttgctcgtgagattgagcttgaaaatccgtttgaaaacatgggggcacagcttttaaaggaagttgctattaaaacaaatgatgttgctggtgatggaacaacaactgctactgttcttgcttatgctattgcaagagaaggccttaagaatgtgtcttcaggaatcaatcctattggaataaaaaagggaatagatcacgctgtaaatttggctgctgagaaaattcgtcagtctgcaaaaaagattacaacaaaagaagagattgcacaagtagcttcaatttctgctaataatgacagttatataggtgaaaaaattgctgaggcaatggataaagttggaaaagatggtgttataacagttgaagagtcaaaaacctttgatactacgatttcttatgttgagggtatgcaatttgatagaggatatctttctccttatttttctaccaataaagaaaatatgagtgttaattttgacgatgctttcatattgatatatgagaaaaagattagttctattaaagagcttttaccagttcttgagaaagttttagggacaaataaacctttattaattattgctgaggatattgagggggatgctcttgctgctcttgttttaaacagcgttagaggagctttaaaggtatgtgcaattaaatctcctggttttggtgatagacgaaaagcaatgcttgaggatattgcagtgcttaccggcggtgttttaatcagtgaggagctaggccttactcttgagacagttgaaattgagcaacttggacaggctaaaactattaaggttgataaagacaataccactattattaataccggcaataaagagcaaataaaggagcgttcagagcttattaaaaagcaaattgaagattcaacatctgaatatgataaagaaaaacttcaagagcgtcttgcaaaacttgttggcggagttgctgttattaatgttggagctgttactgaggtagagcttaaggagaaaaagcatagagttgaggacgctctttctgcaactcgtgctgctgttgaagagggtgttgtgcctggcggtggatcaactcttattgaagttgctatgtatttagatacaatagatacaagtaaattaagctatgaggaaaagcaaggttttgagattgtaaaaagaagtcttgaagagccaatgagacagattatttcaaatgctggttttgaaggatctatttatattcatcaaattaaaacagaaaaaaaagggcttgggtttgatgcttccagctttaagtgggtaaatatgattgagagtggaataattgatcctgctaaggttacaagaagcgcgcttcaaaatgctgcttcaattgctggacttttattaacaacagaatgtgcaatcacagatattaaagaagagaaaaatacttctggtggtggtggttatcctatggacccaggaatgggaatgatg

SEQ ID NO: 329 - DNA, 759 bp, Borrelia burgdorferi s.s.
atgctaggagattttatgtataaattagttttagtaagacacggagagagtgagtggaataaagaaaatctttttactggttggacagatgttaaactttctgacaagggtatcgatgaggctgttgaggcgggtttgcttctcaaacaagaaggctattcttttgatattgcttttagttctttgttgtcaagagctaatgacactttaaatattattttgcgagaattagggcaatcttatattagtgtaaaaaaaacctggagattaaatgaaaggcactatggagctttgcaaggtttaaataagtcagaaacagctgcaaaatatggggaagataaggttttaatttggagacgtagttatgatgtgcccccaatgtctttggatgagtctgatgatcgtcatcccataaaagatccaagatataaacatatccccaaaagggaacttccttcaacagagtgccttaaagatactgttgcaagagttattccttattggactgatgagattgcaaaagaagttcttgaaggtaaaaaagttattgttgctgctcacggtaattctttaagagcgcttgttaaatattttgacaatttaagtgaagaagatgttttaaagcttaacattcccacaggcattcctttagtttacgaattagataaagatttaaatcccattaaacattactatctaggtgatgagagcaaaattaaaaaggcaatggaatctgttgctagtcaaggaaagttaaag

SEQ ID NO: 330 - DNA, 1023 bp, Borrelia burgdorferi s.s.
atgaaaaggaaagctaaaagtattttattttttttattatccactgttctttttgctcaagagactgatggattagcagagggttctaaaagggcagagcctggagaattagttttagattttgccgagcttgcaagagatccaagttcaactagacttgatcttacaaattatgttgattatgtatattcgggcgcttctggtattgttaagccggaagatatggttgtagatcttgggataaataattggagcgttttacttactccttctgcaaggttgcaggcttacgttaaaaattcagttgttgcgcccgctgttgttaagagtgagtcaaaaaggtacgcaggtgatactattttaggggtaagagttttgtttccaagctattctcaatcatctgctatgattatgccaccatttaaaattcctttttattcaggggaaagtggcaatcaatttttaggcaaaggtcttattgataacattaaaaccatgaaagaaattaaggtatctgtttatagtttagggtatgagatagatcttgaggttttatttgaagatatgaatggcatggaatatgcttattctatgggtactttaaagtttaaagggtgggctgatttaatttggtcaaatcctaactatattcctaatatatcatccagaattattaaagacgatgttccaaattatcctcttgcttcaagtaaaatgagatttaaggcttttagagtttcaaagtcacacagttcaaaagagcaaaatttcatcttttatgttaaagatttaagagttctttatgataagttgagtgtttcaatagattctgatattgacagtgagtctgtatttaaagtttatgagactagcggaactgaatcccttcgtaaattaaaggcacacgaaacttttaaaagagttttaaagcttagagaaaaaatttctatgcctgaaggctctttccaaaactttgtagaaaagattgagagtgaaaaacctgaagaatcatctccgaaaaat

SEQ ID NO: 331 - DNA, 1398 bp, Borrelia burgdorferi s.s.
gtgcagataaaagaaatttattttggacccaaaattttagatgataaaaattctaattctaaattgaccaattttgattttaaagttgtttcttttgagcttgggtcggatcattatttagtagacattatgcaggttaaagaaattagaaaatctagtaattttacttatgttccaaatgccaaaaagtatgttgctgggcttgataatttacggggtgaaataattcctattatagatcttagaataatgtttaatttagaatttaataaaaaagatattgaagatattatggttttaaaaaacgaagaccttcttataggggtaattgttgataaaattaataatgttttttcaatagattctagccttattcaagatccacatccagttttatctcaggattctttaataaactatataaaaggcgttgtagattataacgaaaagctttatatacttcttaatgtttttaaaatttttaattatggtgaagaagaaaagttattaaaacctggtcaaaattttgttgaaaaaagcgactttgtaagcgattgtgataatttagatatactagaaaattctaagaatgatttttccaataaggtttcttcaaaaaatgatggtaacaatgaaaattcaactctaaacaatactgcagcttttaatttggaaaatattaaaaaaaatcttttgaaatactcgtttaatgcttctttggtaaatgatgtgtttttggaaaaagttggagtaaaatttaatatggttgatactgattacttgccttgcgatagttttttaaatgaattttattcaaaatcatcgggaaatttgtggggagctgattgtttggaagaatttaaaaatgaaattgttgagagtcgcttaagttttatgaataacttaaattctattttcaatgtattggaaattggttgtggtagtggaaaggagactatggctttagccaatgctttgtctgaatattatgtaaaaccttttaagttgacggccattgataatgatttatcaaaagttgttgaaacttctaggttggtgttttcagagtcagaaattggcattagtgaaatttatagtaggaattcttttgaacaaagtcccggagtttataaatttaagtcagaaatcctaagtaatgttttgtttgaatattccgatgctcttttttcagatttgcctgataatttgggaatggtttttttaaaagatgttttatgtttcttggatagtaaagatcagattttaattttaaatatcattgcttccaaagctattaaaggggctcttttggttttgggagataacgaagagcttaaaaataatgatgtttttataaaagagaaatccacaaaatattttaacttgtacaggaaagtc

SEQ ID NO: 332 - DNA, 2259 bp, Borrelia burgdorferi s.s.
atgttattgaagcttaaatacaggtttgttggatttttattattgtttttaatttttatactgctacttttttccacgatttttaattttgttttatgcggttatttagaagattattataagcagcttacaagggcgcaagtaagaagagcagctttttctttgcaatcttttttagacaccctgcatgtcataatcaatggtgcagcttctaatttggcacttgaaaccatatcagaatttgcaatgtctgagaatagaggaaaagatttctctgagtcggaattgatagatttaagaaaaaatccaaaatttgttattgactctgtaaaggtgagcaaaaaatatcgacaatacttatacaattttatggccaatcttaaaaatgataccctttttgaagaattcgctttttttgattttgaagggagagtaattgttagcacaagacatgagaataatatggattttggtcattctgaggctaataccaattattttaaaaaagctgttgaggattataggcaaaaccaattaaaatttataggttggtattcaaatctttctgaaggaatatccgcagaagttgctattaggtctaaacaaagcgaaaaaaaggcttttgcaataattgtacctgtatattccccagaagataaacttgtttgtgggtatttggccggatatttgcttaatgatattgtggcagatagttttgatagatttagattcggtttttataaaagaggcaattttatttatgtggatcccaacaatatagcagttaatccttttgaagaatataatgaaaccagcagggttagttctaaatttttgaatgttcttaaagatgttttctctaagcccccttttccatcaaacattgccagtgaagtgtcggtttacactattgatagaatacttttgtccgaaatgggagaagattgttattatgcaatgttgcccataagtagtaaattgggagaaaagagtggagtacttattgctaggcttccttataaggatatttacggagtaatatctagtctaagatttcagtatattttatattcagtcttaggcattatagcattaagtattgttctttcaattagaatagacaggattattagttttcgtttaaacgcaattagagttctagttcaagatatggttaagggcaatttagataaagattatgctcttgatgatgatgaaaatactcttgatgaacttggcatgttaagtcttcaggttgttaaaatgaaaaaagctatttctgtagcaatttctagtgttttgagaaatattagctatgtaaataaggcaagtttagaagttgccagttcaagtcaaaatttaagctctagtgcattgcaacaggcatctgctcttgaagaaatgtcagctaatgttgagcaaatagcctcaggtgtcaacatgagcgccaataattcttatgaaacagaacaaatagctttaaagacgaatgaaaattctcagataggtggtagggccgttgaagaatctgttattgctatgcaagacattgtggagaaagttagtgttattgaagagatagctagaaaaaccaatttacttgctttgaatgcggctattgaagctgcaagagcaggagatgagggaaagggatttgctgttgtggccagtgagattagaaagttggctgatttgagtaaaatttctgctcttgagattggagagttagttgaagataactctaaggtagcaactgaagcgggagtgatctttaaagaaatgctacccgaaattgaagaaacggctaatcttgttaagaagatttcagaaggtagctctaagcaaagcgatcagattgctcaatttaaaatggctttagatcaggttggagaagttgttcaatcttcagcttcaagcagtgagcagctttctagtatgtccgataaaatgttagaaaagtctaaggaacttagaaaatctgtattatttttcaaaattaaagattctaaaattgaaaatccagaaaatgatgattatgatttcaggttaatagattgtcctgaaaattcttttaaagatgaaaatcaaaatttgaaaagcaatggaatttctacttcaaatgccagtgggcataataattattctttagatattgagagcgaatcttctgtaagaactattaataagcgagttgatcctaaaaaagctatcgatattgctgataaggatttaaattttgatgatgatttttcagagttt

SEQ ID NO: 333 - DNA, 951 bp, Borrelia burgdorferi s.s.
atggatttgattagtttttctgtacccggaaatttacttttaatgggggagtatactattttagaggaaaagggattggggttggcaattgccatcaacaagagagcatttttttcttttaaaaagagcgattcttggcgcttttttagtaaaaagaaaaaaatagacgatttttctttaatagaaaatagaagcgattttgtttttaaaatgtttgcttacttgagtcaaaattgtttttttaatctagagaattttgcgtatgatgtatatattgatacaagtaattttttctttaatgatggaactaaaaagggatttggttcaagtgctgtcgttgctattggcatagtgtgtgggctttttttaattcacaatgctaccaatgttgttgagaaaggtgaaatttttaaatattgtttggaagcttacaggtattctcaaggaggaataggcagtggatatgatattgctactagtatttttgggggtgttattgagtttgaaggcggctttaatcctaaatgcaggcagctgggtgctgtagagtttaatgatttttatttgatgcagggtttgcaagcaattaaaactactacgtctatttgtgaatacaataaacatagaaattctattttagattttatattgaaatgcaatttggagatgaaaaagcttgttttaaatgctagcaattccaaatccgcattaatttctagtttaagaagggctaaagaattgggattggcaattggagaggcaataggagtttcggcagctttgccttcaagttttgatcaccttttaggtcaatgtgatttgattaaagctttgggagccggaaacgaaacttttttagtttacaggcccaatattgaagcttttaatttgtcaaaaattatttcaattgttttagagaatgaaggcattaagtttgaaagcgataaatgc

SEQ ID NO: 334 - DNA, 1569 bp, Borrelia burgdorferi s.s.
atgaagtatttacaaactgtagcttcaatgaaaagcaaatttgatattgtagctattgtggagcaatatattaagcttgttaaatcgggatctgcttacaaaggtctttgtccttttcatgctgagaagactccctctttttttgtaaatcctttgcaaggatatttttattgttttggatgcaaaaagggtggagatgttattggatttttaatggatatggaaaaaatcaattacaatgatgctcttaagattttatgcgaaaaatccggtattcattatgatgatttaaaaataagtcgaggaagtgaaaataaaaatgaaaataaagacatggtttcaaaaatttactctttgaattctcggttaattaataccattaaattttttttaagtaaaaacaaaaaagctttagattatgttttaaagagtagagcaatatctaaggaaattgttgatttatttgaacttggttatttgccatttaactttaaaaatggtttagagcttcatgattttttagtttcaaaaggatactcttctgaagtacttagaaaaagtggtttgttctcgaaaaccaatcccaaagtttctattttatttcaaagattaatttttccaattaaagactttaaaggaaacgttgttggttttggaggtcgagatttagatgggaaaggttctaagtatattaatttaggtgaaactgaagtttttaaaaaaagggagcttctttatggattttatgagggttttgaggagattaaatctacaaaatcagttatattggtagaagggtatatagatgttcttgctttttttacatctgggattaagagagccgtatctactcttggcactgctttttcaaaagagcatttagctttaattcaaagatatgctgatgagataatattttcttttgatggggatgatgctggactttctgcaactttaaaagcttatcaaatttgtttgccgtttaatatcaatgttagtgttgttcgaatggattttggtactgatcctgcagatgttcttaaaagtgagggtgtagactccttgcaaaaaattttaaataatagatgtgatgcttttgaatatcttttggatgtttattctaataaatataatttaaataaaactgtagatttaaatgccatgattaatttatttttaaatttgataaatttatcaaaagtagatactcagaaaaaaatttttttagacaagctaagcaataaacttggtattggtgtgacaactttattgaaagattattacagaataaaagaaagatttgtagttgacaataataaaagaaatttgtatgctcataatgatgattcttatgagaggtatctaatagtagctttgttgaaaaattttagttattttagcatagtaaggcgcaatattattgatagtgatttaattaatgtcgatgccagaaaagtttttatgtgctttgaaaatttatttgaaaataataaagatttttcattaatggatttaaaaaaaaatttaaaggatacctataaagttagtgaattttttttgaagaaattt

SEQ ID NO: 335 - DNA, 675 bp, Borrelia burgdorferi s.s.
atgaaaaagccaatttttaaagaaaataccatatattcaagcaaattcgatgacatctattacaatccaaagcagggaattgaagagagtttttatacatttattaaaggttgcaatttagatttagaattaaaaacaaaaaaaaatattttaatagcagagttgggatttggaacaggattaaactttatatgtcttttaaaattcataaaagaaaacaacataacctcaaaaattaattattattctatagaaaaatttccactcgaaaaaaaaacaataatgcaaatttcaaagttctttgctaaagaaaccgcttattttaaattaatgttgaaaaattattctaaaattccaaaaaaaaatttaaaactaaaaataacagaaaatgttaatttaaaaattttaattggagacgccaaaataaaaatcaaagaaattcctgaaaatgtagaatactggtttttagacggatttaatcccaaaaaaaatcctgaaatgtggagcaatgaaatatttaatttaatttctgagaaaagcagtccgaaatgcaagctttcaacattttcctctgcaagaattgtaaaagatggcctaaaacttgctaattttaaatacattcacatagaaaaaggatttggaaataaaagacatatgataaaagctcaaaaaaat

SEQ ID NO: 336 - DNA, 2100 bp, Borrelia burgdorferi s.s.
atgaaaaaaatgttactaatctttagtttttttcttattttcttgaatggatttcctgttagtgcaagagaagttgatagggaaaaattaaaggactttgttaatatggatcttgagtttgtaaattataaaggcccttatgattctacaaatacatatgaacaaatagtgggtattggggagtttttagcaagaccgttgaccaattccaatagcaactcaagttattatggtaaatattttattaatagatttattgatgatcaagataaaaaagcaagcgttgatgttttttctattggtagtaagtcagagcttgacagtatattgaatttaagaagaattcttacagggtatttaataaagtctttcgattatgacaggtctagtgcagaattaattgctaaggttattacaatatataatgctgtttatagaggagatttggattattataaagggttttatattgaggctgctttaaagtctttaagtaaagaaaatgcaggtctttctagggtttatagtcagtgggctggaaagacacaaatatttattcctcttaaaaaggatattttgtctggaaatattgagtctgacattgatattgacagtttagttacagataaggtggtggcagctcttttaagtgaaaatgaagcaggtgttaactttgcaagagatattacagatattcaaggcgaaactcataaggcagatcaagataaaattgatattgaattagacaatattcatgaaagtgattccaatataacagaaactattgaaaatttaagggatcagcttgaaaaagctacagatgaagagcataaaaaagagattgaaagtcaggttgatgctaaaaagaaacaaaaggaagagctagataaaaaggcaataaatcttgataaagctcagcaaaaattagattctgctgaagataatttagatgttcaaagaaatactgttagagagaaaattcaagaggatattaacgaaattaacaaggaaaagaatttaccaaagcctggtgatgtaagttctcctaaagttgataagcaactacaaataaaagagagcctggaagatttgcaggagcagcttaaagaaactggtgatgaaaatcagaaaagagaaattgaaaagcaaattgaaatcaaaaaaagtgatgaaaagcttttaaaaagtaaagatgataaagcaagtaaagatggtaaagccttggatcttgatcgagaattaaattctaaagcttctagcaaagaaaaaagtaaagccaaggaagaagaaataaccaagggtaagtcacagaaaagcttaggcgatttgaataatgatgaaaatcttatgatgccagaagatcaaaaattacctgaggttaaaaaattagatagcaaaaaagaatttaaacctgtttctgaggttgagaaattagataagattttcaagtctaataacaatgttggagaattatcaccgttagataaatcttcttataaagacattgattcaaaagaggagacagttaataaagatgttaatttgcaaaagactaagcctcaggttaaagaccaagttacttctttgaatgaagatttgactactatgtctatagattccagtagtcctgtatttttagaggttattgatccaattacaaatttaggaactcttcaacttattgatttaaatactggtgttaggcttaaagaaagcactcagcaaggcattcagcggtatggaatttatgaacgtgaaaaagatttggttgttattaaaatggattcaggaaaagctaagcttcagatacttgataaacttgaaaatttaaaagtggtatcagagtctaattttgagattaataaaaattcatctctttatgttgattctaaaatgattttagtagctgttagggataaagatagtagtaatgattggagattggccaaattttctcctaaaaatttagatgagtttattctttcagagaataaaattatgccttttactagcttttctgtgagaaaaaattttatttatttgcaagatgagtttaaaagtctagttattttagatgtaaatactttaaagaaagttaag

SEQ ID NO: 337 - DNA, 1017 bp, Borrelia burgdorferi s.s.
gtgtttatgacaaaaccaaaaatattctcaatcaataaagaaaaaataaaaatattgataatagtagtgttaacatctacattcttattgggaataattttttcaaatgaaaataaagtagcaaggatccttgaagaaaaattttttgattttgactttaatttaatttctaaaattgaaacagagcttgaaggaacgctaacaaaacttggcaaagattggattttaacatacaataaacaaaatattcctgttgataacaaaaaagtcaactctctaatcaaagcattagacgagcttcaaaaaaacaagcttgtaagtagagatcaaaaaaaacacaaggaactaggaattggagaaaatccaagctttaaattatttgacaataataataagctgttaacagaaatttttgttggaaaatcaggagaaggcgattcaagactggcatacattaaaggtagtgacgaaaatgtttacttaacaaaaaacattttcttatcatacaaaggaaattcttacaatacattttcagatactacattgttccaagaaaaaaacacaaaattagaaaatttatcattcaaaataataagaaaattaaacaaggaaaatgaaaataacataaataataactatgagattatcagtaaagatggcctttattttttaaataaccaaaaaatgacaaaagaaaggcctttaaatattattgctgaatttaaagctgacggacttgaaattgataaatctaaaatagatgattataatcttcaatacaaaattgaagtcaaatggagcaataaaagtgtcaataatattgaagtttattttaataaaaacgaagaaaatgacaaagacatattaatcaaaaaagataaagatgaatattactacacgactagcaaatggactttttttgatgtattcgacttagaaaaaaaattaacagaaaaagatgatatttctagcaacgataatcaagaagatcatcatgaacatcacaacaatgcagat

SEQ ID NO: 338 - DNA, 927 bp, Borrelia burgdorferi s.s.
atgataaatgtagaaaaagttactaaaatgtatgggccatttacagcactatttaatgttagctttaaggttgaagaaggcgaagtacttggtatacttggcccaaacggagccggaaagtccacattaatcaaaatcttaacatcatttcattatccaagcaaaggtaatgtaaaaatttttggaaaagacattgtagagcattcgaaagaaatactacagcaaataggatatgttcctgaaaaactagctctttatccagagctttctgttaaagaatatttaaagtttatatcagaaataaaaggtgttaaaaaattaaaaaaagaaattgacagagtaataagcatattcaaattaaaagaggttgaagataagctgatttctcaactttcaaaaggatttagacaaagagtaggaatagctggcgctttaataaacaatcctaaacttgtaatacttgatgagccaacaaacggtcttgatccaaatcaaataattgaatttaaagaatttttaagagaacttgcaaaagaaagtacaatattattctcttcgcacatactaagcgaagtagaatctatttgtaaaagaataattattgtcaacaacggagtaattgttgctgatgacacaaaagaaaatattattaaaaataaacttaaagagattgaaatagaattaatagtttcaaaaaaatctgaaaatgagaaaaaaattttcaacagcaaaaatgatattttttcattaataaagcttgaagaacacgaaaaagacttaaatatttcattaaaactatctcaaggcaaaacagaagaagatctctttagctacatagtaaaaaataatataatcttaaaagcaatgattccaaaacatgaaagccttgaaaagatatttagcaaattaaccaaggagagagaaaaa

SEQ ID NO: 339 - DNA, 372 bp, Borrelia burgdorferi s.s.
ttggacttgcaaataataacaaactgtaataaactgtctctcaacatggagctaaacgaataccaagaaaaagcaaaaaaaactgctaaatacaaaaataaaaaagaagaattaattttaacaacacttggtcttgctggtgaaactggagaagttgttgaaaaaataaaaaaattgggaagagataaaaattacattattgatgatgagtatttaatatcaattaaaaaagagcttggggacgtattatggtacttgtcaagtttaagcaataatttaggcattacgcttgaagatgttgccctcacaaacctaaaaaaaatacaaaaacgacatgaaaatggaacaataaatggcgaaggcgatgacaga

SEQ ID NO: 340 - DNA, 1044 bp, Borrelia burgdorferi s.s.
atgacaatgcttccaaaaattgcaaaagagataataaacgaatatgatcaaaaaatactgccaaatgcaattcttttactaggagaaaaattttcttcaaaaaagattagcgcaattgagcttgcaaaaaaaatattaaacggaaaaaacttaacaaaccctaatttgctcattttctcaaatcttgacacagtagaagcaaaagcacatctttctacaaattcgcaaaagatagcaaataaatacctagaatatattaaaactgtaatttttaccaaatgttatttcagcaatgaaaaaaatttaaaaaaaatagaaaaaaatatcaactacattaattctgtttattatgaaaaagaatacaatgaaaacataaaaaatgagcttataaaaaatatagaaaatataaacaaagaattaaatcatagcattactgtttatgatgtaaaaaaaattcaaacttggattttttctgaaaaagaaaaaccaaaggtaatctacataaacgaaatcgaaaatttatcatttaatgtccataactcacttttaaaaatattggaagagcctccctcaaatatttactttatcttggcagcaagaaataaaaacaaaataccaaaaacaatactttcaagacttagagtctacaatttcgcaaaactagacagaagcttagaaattcaaagatttaaagaaagctttctaataaataaagatataacaattgaagagtatttcgcctcattttacaaagaagaaagcaaaaaaataaaaaaagaattggcaaaaattctaaatataataaaagaaaaaaaatccatatttaatcttgaagaagtcgactttataaaagatgagcaaagctttaaaatatttttaaacgaacttacaattaacattagaaaagattttttagaaaacaaaatagatattaatcaatatctaaagtacacagagcatttgaaaaatatttacaaatatcgcccctataatcaaaataaaaaattaataatagaaaacttaatgctaaattatgaggagata

SEQ ID NO: 341 - DNA, 1005 bp, Borrelia burgdorferi s.s.
atgaacaaactaatgttgatgttaattacatttgcaacgagtctattagcccaaacaaacaaagcttcaacaggactaaaaacagatcaatcatttaacaatagcctatctgaaagcgtaaaattaaaagaaattgcggatatttatcccacaaatacaaattttttaacaggtattggaatagtagcgggacttgctggaaaaggagactctataaaacaaaaagaccttataattaaaattttagaagaaaacaatataataaatgaaataggctctaataacatagaaagtaaaaatattgcactagtaaatgtcagtctccaagtaaaaggtaatacaatcaaaggttcaaaacataaagcttgcgttgcatcaatactggactcaaaagatttaacaaatggaatacttttaaaaacaaatcttaaaaataaagagggggaaataatagcaattgcatcaggaattacacagcccaataataaattaaaaggatctggatatactatagatagtgtaataataaatgagaatcaaaatattaaccacagttataatataattcttaaaaaaggaaattatacattaataaatagaattcataaaatattaacctctaaaaaaatcaacaacaaaattaaatcagacagcacaatagaaatagaagcaaaaaacataagcctattagaagagattgaaaatattaaaatagaaaccaaccccaagatattaatagacaaaaaaaatggtattattttagcaagtgaaaatgcaaaaataggaacttttacattttccattgaaaaagacaatcaaaacatttttttaagtaaaaataacaaaacaacaattcaagtaaactcaatgaaattaaatgaatttatattaaaaaattccaacaatcttagcaataaagaattaattcaaataattcaagctgcgcaaaaaattaataaattaaatggggaacttatcttggaggaaattgatggaaaccaaaat

SEQ ID NO: 342 - DNA, 1182 bp, Borrelia burgdorferi s.s.
ttgagaaaggatttaatttttttatttttaattgttttaataatagcaagtgtagtaattttttttattagaagttcgaaaaaagagttggtttacttcgagcttaatacaaagagtaatattagttttttgtttctaatagaagatcttaacaaaaaccttgtaagtatgcaagaaatttttattaatatgaaaacaggaaatattgggttttttgatattccaattcatactggatatgaagatttaaaagggaatatatcttggtttaaagatctttataaaaaaaattcttttaataaatttttatctaaaatttatacacaattatctcatgaatcagattattatattcgttttcaaaaagaaaattttgttaggcttattgattacttagggggagttagacttcttgttaaaaacccagtgaaagtttatagtttcgaggattctattttaataccctctggcacttctaattttgatggtgataaggcttatgattatttgagatattttaatgatgttaatcagtttgaagagagagttgaattttttaaagaattttttaaaagacttctttttcaaatttcagattttggcattgaaaatgacagtttttttaaaatatattccatgttagatactaacctttcagaggttgtttttaagtatattgttaaaaattataaaataaataatgataaaattatttctattaatattaaaggacaagaagagatttttaaggataatgataataatttgataaaggtggtttttccttattatgggggtgctattttaaaagaatcggtggataaattaaacaaagagttggttaatgaaggtgcagaagagatagtaaagattgttgttttaaatggaacaaaagttgttgggcttgcaaaaaaaacagcaaatatttttaattctttaaaatttaaagttttaaaatttggtaatgcagataaaaattcttataaaaataccctgattataaataattcggataatttagaaatggctgttagggttggagaggtaattaaaacttcaaatattaagccaatttctgaggttcaagctaaaagattgttagagcttgataatcttgatattaatcctgatgtaatagttattttaggagatgattttgatggaaggtatgttaaaagtaaa

SEQ ID NO: 343 - DNA, 1917 bp, Borrelia burgdorferi s.s.
atgaatggcaataataatatgaataacaatggaaaatctaacaacaaaaaaaagaataaaaattggattttaggacttgttgttgtttttctaatttcagcaatatttatgtcatattttataagggggggggaaagctataaaaatgttccttatagcacttttcagagttatttagacaatggtctagttgagtctgtagtaataattgataaaaatttgattcaatttgtcgtcaagggttctaactttgcaaagtcttatttttctaccagcattccctatcttgatataaatttactttcagaactaaaaaataaaaaagttgagcttagctcagggaaaagtcaagcttctctgattggggttttattacaaactttgccatggattttgttttttattttctttttctttatatttcgtcaaactcaaggtggcggtgggaaggtttttacatttgggaaaagtaatgctcaaaagtatgaagctggaaagaataaaatcacctttaaagatgtggctggtcaagaagaggttaagcaagagcttcgagaagttgtcgaatttcttaaaaatccaaaaaaatttgaaaaaataggtgcaaaaatccccaaaggagtgcttttagtgggctctccgggtactggcaagactttgcttgccaaagccgttgccggtgaggctggggttagtttctttcacatgtcaggctcagattttgttgaaatgtttgttggggttggagcaagtcgtgttagagatttatttgataatgctagaaaaaattctccatgtattatttttattgatgagcttgatgctgttggtcgaagtcgtggtgcggggcttggcggtggtcatgatgaaagagagcaaactcttaatcagctgttagttgaaatggatggatttggaacgcataccaatgtaattgttatggccgctacaaatcgtcccgatgttcttgactctgctttgcttaggcctggacgatttgacaggcaagtaacagtttctttgcctgatattaaggaaagagaggcaatattaaatattcattctttaaaaacgaagctttcaaaagatattaatttacaagtaatagcaagagctactcctggagctagtggtgctgatcttgcaaatttaattaatgaaggagccttaatagctgcaaggaataatcaagatgaaattttaatgaaggatatggaagaagccagagataaaatattgatgggagttgcaaaaaaatccatgactattactgataggcaaaagcttgagacggcttatcatgaggcaggccatgctttgcttcactattatcttgaacatgctgatccacttcacaaagttaccattattccaaggggcagggcacttggtgttgcattttctcttccaagggaagatagactttcaataaacaaacaccaaattcttgacaaaataaagatatgctatggtggttatgctagcgagcaaataaatttgggtgttacaacagcgggtgttcaaaatgatttaatgcaagctactagtttggctaaaaaaatggttacggagtggggaatgggtgaagaagttggtccaatatttttagtagacgatgaagcacctattttccttccgaaagagttttcaaaggctaaagcttattctgagaacactgccgataaagttgacagagaggtaaaaagaatacttgaagaatgtttaaaagaggcatcggatattcttttaaagcataaggatcaacttgttaagcttgcaaaagaacttgttttaaaagaaactttgacagacaaagaagtgagagagcttttgggttttgaagctaataaggatgaatacgatttattttcatcagactctactacaaaagaagtaaagggggaggatgtaaaaggt

SEQ ID NO: 344 - DNA, 4395 bp, Borrelia burgdorferi s.s.
atgaatttgttgtttttgagaagtaagacatttatattgttgattttgccattttttatttttgttttaataattttttccattaatctatttgttcaagctcaaatttattctgcaaagttttttgctataaaatatcttgaatcaaaatttggctttaagattaaatatgataaaatttcaccgtatttcttatcatcaatcaagatagacggtttagagttaagcttggatggaaaagataaaatattaatagatattgttaggatagatttaaatctgtttaaattaattttgggtgatgaaaatattattttaaatgtttatgttaaaggaagtaatttcaattttgatataaacgactttagtttatctggcgatttaaatcctagcaatgcctattctgacaatgaaaatacagtttttaataaaattttaaactacctttatagattaaatattaatttagaaaatatcaatattaatatcaagcttaatgataatagttggcttaattttcaagttaaaaatttttccttaagtaccgtagatgaagattttttatttagctctgtagttgattttagtgctgttaaaaatttagaaattaatttaccctttgaaagagttgatgatggaattttggattcaactttctattttgaggggaaattcaaaaaaggctttgaagatggctatgttaattttagcttttttgaatttaaaacaagttatttttctttacttgagcaggggttccaaataaattattcaaaaggaaatttaaaaatttttaatttacgaagagagaattttgattttaatttaagttatgacaaggctaatggttttgttcgattagatgctttatttttcaatgttagtcttttagattggattaagctaaacaaaggctttgaaatttataaagattattttgatataagtttaaatgggcaattggcattttcttatgattttaaggacaaagatttaagatatgcaggaataatagattcatctttaaatgtagatactataggaaaagaagttcaaggcttgcagcttgaaatcaagggggatgatagaattgtaagtgttaagaatgcttttttaaagcttaaaaggggggttgtaaactataaaggttattattctttgaaagatttgcttccaatgggacgtcttaactttaagtctgcaaaaattttaaactttaacgacctaaatgggtatttagattttaataaagataaagatattttttcggttaagtctgataattttagtcttggaaatcttagttttcaaaatttaattttaaaaacttattttttaaaggataaaatttttgttgactatttgatttatttagaaaataaaaactctcaaatttctttaaaaggagatcttaatgatgaagaattttctttaagcttaggtattaaagaatttcctttgctttttttaaaagaagttattcccagttctcacttgataaatttttttcccaagactttattttcaggtaaatatttaaatttggtttctgattttaattttaataaatttaattatcataaaaataaattaaaaaaattcaatttcatggtattttcaaagttagacaatttcaaatttgtgcttgatgccagtggagaaaaaaatttttacaaatcaaacaattttgatttgcagtacaatgatcacaatttgcattctaacttgtttgttgaactatttgaaagtgggtttaatattagcacgaatttttcttatttgaataaagtttatcctttgcattttaatgttaatcttaaagataagtttattgttgccgaatctcctcttggtattaaattagattttaattattttgattctaaagtagtttatacccttaatgttaatgattttaaggtttacaataaaacctctgatcttttaataaatataaattttaatgggaactatttaggccttaatgaagatttgaaatttaaaatagacgagtttaatataataaaagtttctaaaacacctgcctataatttcaactttggttttaagggcttatatgaatatgataaattgtacatttctgatgttaaacttataaacaaactttcaaatttgcaaggatatggacaatttaatttaaaagataattttaatggaagtttgaatctattttctagcttaaattcagagagatattttttaggggttaattccgatgaatatggaagttattttttgcttaaatttcaagacttagatttttacaattttaattctttctcccttttagagggaaaggttaatggtaattttttgctaaattttaaaaagaatgattttaaaaattattctttgagtggatatcttgaggcakataaattaacttttttgggcgttcccgttcagttttctatgaatttaggattattggataataagcttaacatatatgacataaaagccaagcgcaataaaaaagagtttcttaccggaagcttaagatatgacctaagcagttctataggggtatctaatatagtttttaatagcgacttgttttcttacaggtttaatgcaaattttagaaatttccaaagtggagttgaagagcaatttggagttttgaaaaccaaaacagagggcgaatttttctttagagacattaagtataaaaatgaatctttatccaatcttacgattgaatttagcaatgattttgaaaaatttaatatggcttcaattgattatgaccttgttaatgttttatatcattatggcagtggggaatatagctttattttaaaagattatttgccccttagttttaattcgtcaggcaaaataattaaaaataaaattcttggaaatgtgagagatattaaatttgattcaaaaataatcaccaaagattttttggattcacattctttatttaatgttgacaatcattttattctttacgatcttgttttaaatggtgaattcgatattgatggggatttgtataatcctaatattaatggaagtttaaatattcaaaaaggatcaattagcactgagtatttaagagcttctagaaaatttggtggtgatagagctttagaaatatttgatatgccagttgcaattcaggataataaaatcatttttagtaatgagtttaacctagatcgatattccaagatttttgtttctactagtttaaatttaaattttttaagtgatactattattgattattacaaaatagatattaatgtgactggtagaacgggagttcctattaaatttgaaaaaattgccttaagctttacaggctatgctttaggcgatttttcaattgaaggaaatgctgatgaaattatgtttaaaggcattttaaatatttcaaatgcttgggtttattctcttgaaagttctgttgttgatttattaataaatcctttcaaacgagcaaaaagattgcaaactgatattaatcttctagattttgatattttaactgatcttgagataaattttgacagcggtgttacttttcattggccagatagtaatatttcttttttacaagctactatttcaagaggggataaacttgtaataaaatctgacacaaaaacagatgattttattattaagggagatttgaatattgcaagtggttttgttaattataataataaaaaatttatttttaaaagcggctcttatatatcctttaatgagagtagggctaaatttgatccatggataaaagcggaggctacaaatactattaaggatagaaatgataaactgcttgttacaataagcattgatagtcctttaagtttatggaaaattgagtttatgtcttatccttctagaaatgagcaggaaattaaatatttgctttcaggctcaacaataggagggtatgagggaggattgcgatcggcagggactaatgctgctgaaatggcaattggaatagtaagtgacattgctcttgattttttaattcaacccattgaagattatatgcgttctgtattaaacttagacttgttgagtataaagacagatatattgaaaaattctattaatagtaattttttcaaaatcgggaatcctacttttgttgatgttcttgacaatacaagtgttaaggtaggcaaatatcttgttgagggtgtttttattagtgggggctttggttttttgaaagaacaaatgtctcctttttcaaaagatttaaattttgttgtcaatttgggtattgagtttgattctccattttttttggttaattatgagtttgattacaattttatgaaaaaaggtttagatggaataggaaataatataggcatttcttggaaatttaaatat

SEQ ID NO: 345 - DNA, 555 bp, Borrelia burgdorferi s.s.
ttgattaatgctatggagaaatttgtgttttttttgattttaccattgttttttttattatcttttaatgttttttcgatagatgttattaagataggaattgttgattttgatagaattgtgattgaagttttaaatcctcaattgaaagctaatcttgatcaaataaaaaatcggtatcaagaacaaataaatacgttaaatttagagcttaagaatttaaaacatatgtatgataaatcgattgctgataatgatttagataatgcaagatcttttggaaatcaatataatttgaaagttgatgagctaaagagagtgtctagtttagcaaagaataatttagaacagcagagattggccaatattaatagtttaaataataatagtgaatctttaagtaaaatacttcgtggtattcaatatgttgcagaaattaatgggttttctttgattatgaaaaaaaataatccatatattctttaccacaatagcactgttgatataacaaacgatgttgttaagcatcttttagaaaaggacaataaaaaccct

SEQ ID NO: 346 - DNA, 822 bp, Borrelia burgdorferi s.s.
atgttaaaaacattaacaaaaataattaccatttcatgcctcatagtgggatgcgcaagcctgccttacactcctccaaaacaaaatctaaattacttaatggaacttttacctggcgcaaatttatacgcccatgtaaatttaattaaaaacaggtctatttataactctttaagccctaaatataaatcagttcttgggcttataagcaatttatactttagctataaaaaagaaaataacgattttgctctactaataatgggtaatttcccaaaagatattttctggggaattcataaaaatagaaatacagaatcaataggcaatatatttacaaatccaaaatggaaacttaaaaattcaaatatatacattattccaaacaaagctagaactagcattgcaataacccaaaaagatataaccgcaaaagacaataatatgctaacaacaaaatatattggggaaatagaaaaaaatgaaatgtttttttggattcaagatccaacattattgctcccaaaccaaatagtaagcagcaaaaatttaattccctttagcagtggaactttgtctataaacagcttaaatcaagaagaatatatttttaaatccttaatcaaaacaaataatccaccaatactaaaaatattgtcaaaaaagttaattccaaccgtcttgacaaacatgacaaacctcacaatatcaagccacataaagaccacaataaaagaccaaaatacggttgaaatagaatttaatattcaaaaatctagtgttgaaagccttatagaaaaactagcttcaaatattcaaacc

SEQ ID NO: 347 - DNA, 969 bp, Borrelia burgdorferi s.s.
atgaaaaaaaaaaatttatcaatttacatgataatgctaataagtttattatcatgtaatacaagtgaccccaatgaattaactcgtaaaaaaatgcaagacaagaacgtgaaaattttaggatttttagagaaaattcaagcagataataaagaaattgttgaaaaacatatagaaaaaaaagaaaaacaaatggtgcaggctgcttctgtagcacctattaatgtagagagtaatttcccatattatcttcaagaagaaatagagataaaagaagaagagttggttccaaatactgatgaagaaaagaaggcagagaaggcaattagcgatgggagtcttgaatttgctaaattagttgatgatgaaaataaacttaaaaatgaatctgcgcaattagaatctagttttaataatgtttataaagaaatcttagaacttgcagatttaatacaagcagaggtgcatgttgcaggaaggataaatagctatataaaaaaaagaaagaccactaaagaaaaagaatataagaagagagaaattaagaataagatagaaaaacaggctctaattaagttgttcaatcagttattagaaaaaagaggcgatattgaaaatcttcatactcaattaaatagtggacttagcgagagagcatctgcaaaatacttttttgagaaagccaaagaaactttaaaagctgctattactgaaagattaaataacaaacgtaaaaatcggccatggtgggcaagaagaacacatagtaatttagcaatacaggcaaaaaatgaggcagaggatgctttaaaccaattaagtacttcttcttttaggatacttgaagcaatgaaaataaaggaagatgtaaaacagcttcttgaagaagtaaaatcttttctagattcttcaaagagcaaaatcttttctagtggcgatagattatatgattttttagagacgagtaaa

SEQ ID NO: 348 - DNA, 507 bp, Borrelia burgdorferi s.s.
ttgaaaaaaacgattattgtatttataatattagcatttatgcttaattgcaaaaacaaaagtaatgatgccgagccaaacaacgatctagatgaaaaatcgcaagccaaatcaaacctagttgatgaagatagaattgaattcagcaaagcaacacctttagaaaaattagtaagcagattaaacttaaacaacacggaaaaagaaacactaacatttttaacaaacttattaaaagaaaaactagtagatccaaatattggcttacattttaaaaatagcggtggagacgaaagcaaaatagaagaatctgtacaaaaatttctatcagagctaaaagaagatgaaataaaagatctgcttgcgaaaattaaagaaaataaagataaaaaagaaaaagatccagaagagctaaatacttacaaaagcatacttgctagcggatttgatggaatttttaatcaagcagattccaaaaccacacttaataaacttaaagacactata

SEQ ID NO: 349 - DNA, 846 bp, Borrelia burgdorferi s.s.
ttgaaaagagtcattgtatcctttgtggttttaatcctagggtgtaatttagatgataattcaaaaatggagagaaagggtagtaataagcttattagagaaagtggatcagataggcggggtcaagaaaatagagccttgggggcgatgaattttgggcttttttctggagattctggtgtagtttatgatttgcaaaattatgaaactttaaaagctcttgaaaataaaaataaatttattgattactctaaaatagagtttttagaaggaacaaaatcaataaatgcttttatttgggcagtttctgttcgttggataaaaattaaagccagagatttgtttggggagtgtggagattttattaaagagcttaagggcattaagtattcttatcttgtttctcctgttgatggaagctatatttcttatgccatgcctataatagtttttgaaactactagagagagtgatccgctttattctgtttctgggtttaaattaataagcaagggaaatgatataaattttaatgaaaataaaagcggattttggggaagacttccaatgtctgaaaaatcagttgaatctgggcttgtaaccgcatatccttttggttctagcgatgctaaaaaagtgattgaagcttttgcttctctttataataatggaacttggagtgatatgattgccgagattactattaagtcaaagcaatatccaaaaaatgaaaaagtttacagaattacgcttgattctcagctttttaatgttgctatgaaaaaaataattgaaaaatatcctaaaataaaaagtgcaagttttgcatttaattcgttaattaac

SEQ ID NO: 350 - DNA, 543 bp, Borrelia burgdorferi s.s.
gtggagataaagataaataaaagaaatttatctgaaagcgttagagaagaagagcaagcacttgttcattataataaacttaaagaaaaattaaacattaattttcaaaaagaaatttattgcaaaatagaagcaatgaaggttttaaaagaaattaaagataaagaatattataaacttgacaattattccagttttgatgattttgcaaaagactatagacttgccagaactcaaacttataagtatcttaaaattgcaacagcaatagaagaagggcttattgaagaaaagtatgtagttaaaaacggaatcaatgatacaatttgtcttcttaaaacaaaagaaagtccaagtttaaaaaaatctaatcaaaacccaataaaaccactaagatttcagcttaaaaaggaagaagcttattctttttataaaaaaaatcccaagcttacaagctttcttttagagaaaattttttttaaggaaaaagattttttattaaaaataattaaagaatttgaaactttaagaaataaacgaaaa

SEQ ID NO: 351 - DNA, 573 bp, Borrelia burgdorferi s.s.
atgattaaatgtaataataaaacttttaacaatttacttaaactaactatacttgttaacctacttatatcatgtggactaacaggagcaacaaaaattagattagaacgaagcgctaaagacattacagatgaaatagatgcaattaaaaaagacgctgctcttaagggcgtaaattttgatgcctttaaagataaaaaaacgggtagtggggtatcagaaaatccattcatacttgaagcaaaagtgcgagctactacagtagcggaaaaattcgtaatagcaatagaagaggaagctactaaactcaaagaaactggaagtagtggtgaattttcagcaatgtatgatttaatgtttgaagtctcaaaaccattacaaaaattgggaatacaagagatgacaaaaacagtctcagatgcagctgaagagaatcctccaactacagctcaaggagtgcttgaaattgcaaaaaaaatgagagaaaaattacaaagggttcatacaaaaaactactgcacccttaaaaagaaggaaaattctacttttactgatgaaaaatgcaaaaataac

SEQ ID NO: 352 - DNA, 1587 bp, Borrelia burgdorferi s.s.
atgataataaaaaaaagaggacttttaatactgggcattgctactgtaatctcgtgctcagcaatgtctaaaccaaaagatgatattgtctttggtgttggaattggaaacgaaccaacatcgcttgatccacaattttgcagcgataggctaggtaatttaattataaacgaactatttgtagggcttttaaggggtgaccccaaaacgggtggatacaggccaggacttgcaaaaaattgggacatttcttacgacaacacctgctatacattccatttaagagacgacatttattggagtgacggcattaaaataacagcaagcaccattagagattcctacataatggccttagaaaatgagcttgatgtgccacatattaacctattaacatcaaagataaaaaatgcacaagaattttacgaaacaaaattaaatgcagatgaagttggagtaaaggtaatcaatgagcaaactttagaaataactctctctcgcccagcaagatattttcttgacatgcttacacacccaatatttatacccattcctacgcacattgttaaaaagtttggaaacaaatggacaagctcagaaaacatggttacaagcgggcctttcaagctaaaaagaaggatcttaaacgaagaaatatctcttgaaaaaaatgaaaaattctatgatgctaaaaacgttgctattaatgagctcatatttgttactataaacgacacccgcagaatttacagtatgtacgagcacaacgaaatagatgctatttttaataacatccccttaagccttattaatgagcttatcttaagagaagatttttattcagctgacattaatcaaattgggtttttttcactaaacacaaatgttaaacctcttaacaatgtaaaagtaagagaagcattggctcttgcggttgacagagaaactctaacttacagagttcttgacaacaactttaaagcaacaagaaaaataagccctaatattaacaactataattatgggaaaaagcttaagccatacaacccgcgaaaagcagaaaagctcttagccgaagctggatatccagatggtaaaaattttccaactcttacaataaaatacaataaaaatgaccttgaaaaagaagttgctagttttattcaaagccaatggaaaaaagttttaaatattgatgtagaaattgagcctgaaacatgggtcaaccacatatcaaatattttaaaaggtcaatatgagatctcagtaaggtcctggcaaggagattatttagatcccatggcattctttaatatatttgaaactaaaaactcacattttgcatcttacggatattcaaatcctgaacttgatgagcttataataaaatccgatcttgaagaggatgaaaaactaagattagaaatattaaaaaagatagaagaaataattattgaaaatgattatccaataattccaatatacagtgttgcgggaaactatctttttaaaaacgacaaatggctagggtggaatacaaacaattcagaaagatttgccctatcagaaataaaacctatagaagaa

SEQ ID NO: 353 - DNA, 651 bp, Borrelia burgdorferi s.s.
atgaaaggaataagtattttatcattactattattggcattttcttgcaaacaatatggtagtgttaaggcactcacagaaattgcttctgattctggagataataattcacttgtcgttagtgataatttagcggctaaagagctgattgccgaaaaagggcctactttaacatcacaggaatctgaaagattagaggctttaaaaacctttttaaaagacgcaatgggtgttaatggtaaaacaggcgatacaaaagccgagtacgacaaatcttataaagaattttttgattggctttctaaggatgttaacaaacaaaaagagtttgtaagttgttttaacaatatttgtggcattgttactaaagcagtagatgcaagcaagcaaaggtataagggcaatcaacaatccttaggttttaatgaatatgtttgttatgatattaaaaccagaactggagatgatttaagtttatttttccaaaaagtagctgatgcatttggtgctgaagagtacaaaaagaaagatgatgagagcagtcaaaagcctgagaaatgcaatgaagagattttcaaagtaatcaaaagagtgtttacagaaagtgatagtaataatgaattaaaaaatttaaaaaatcatggaaatatc

SEQ ID NO: 354 - DNA, 1242 bp, Borrelia burgdorferi s.s.
ttgaacggcaagcttagaaaagctttaaaaattgcaatatttacaacattgctgctagttattagctgtaatgcaaatatggatacaaacgataaaaacaaagccttaaacgaatataaattaaaaaatatttcagaagtcattaagaacagcttgcagcttgaatcagaccctaaattaaaaaaagaacctgaatcaaacataaatcaaagcacaccccctattttagaaattgaaaaaatcgaacctggaaaacaagagatgtccttaaaatctgaatttggcagcgaaagcttaatgccactagaagaaccagaagaagcaaatatggcaaaatcagaagaagaaattgcaaaaatacaagaaaaattattgttaattggagcttctgacgagatcacagatcaagaattgggcgaaaatatgcaaaaatttttaaatccaactacagtagaatttaaaatttcaacaaccaccaacgaaacaatacttaccacaattgaagaagaagaaattaataacaacaaagacaaaatttttgaccacaaagaagaaaatgtcactttaggaaataactctttagaaaatgcaactttaaacaaaaacacaataaccttagcacaaaaccaaaaatacaccactcacttaaaaaatgatgacaaattcataacaaaagaatacttaaagcaagttagagactctctagataaagcgctaaatgcaataaaaaatttagaaacatctaaagaatttagagagcttgaaaatttaccaaaggatcaagaaaactctccaagcgcaaaaaaagaatcaactgagagcaacattaataatactaataccgagaacatagaaataataaaaaacagattgctcgaagagctaaacaaaagtgagcttatttttgaagacactaaagatcccctaggaacaagcacaataaaaaaggtcatagatgctgctaaaaaatggcaggaaaaagaaaattcaagtcaaatagactgggacttgggctttaagtttcacccaaacccaaaattttacaacaaattgacagctcaagaatataaagttttggctgaaaaatttactaaagttaaaaatgaatacaaaaacacaaaagaacaactaaaagctgagtccaaattaacaaccaacagcatcagcaaaataattaacgcaacaaaagaatttgcaaaccaggtaataaacttaatcttattggtagaaaaaaattatcaa

SEQ ID NO: 355 - DNA, 888 bp, Borrelia burgdorferi s.s.
ttgaaaagaaacaaaatttggaaaacgttaaaactgtttcaaataactttactgttctcatgctctttttattctaaatcaaacaacacagaagcgataagtgaattacaatcaagccctattaaacttggaaaaattaaagttttacaaaaaacagaaaagattgtaagcacccaaaatcttcaaaacttacaacaaagccagttctttaaaaatgaaaaagaaaaaataattaaaaaaattgcacaagaatttgatgagaatgaaaaattgattaataaaataggtccaaatatcgaaatgtttgctcaaacaataaacacggatattcaaaaaatcgaacctaatgatcaatttggaataaataaaactttattcacagaaaaaaaagacaataatattgactttatgttaaaagacaatcgacttagaagattattttactcatctttaaattatgatgaaaataaaatcaaaaaattagccacaatactcgcgcaaacatcaagctcaaacgactaccattacacacttattggtttaattttttggacaggatttaaaatccaagaagcatttgaaagcgctgttaatattttaactaaagacgagcaaaagcgcctaatttttaattttagaacaaaaacagtaaaagagattcaggaaaattttgaaaaactaatgcaagagagaaattcatggataaaaatcgtcgataacattattggcgaatatgacaaaaatacgggaggatgcaaagctgatggaaaaattctcggagaagtaataagggttggatacgagcatgaactcgactcaaataaaagtatgcaaattttaaacaatattgaaacaccgctaaaaacctgttgtgaccacatacactac

SEQ ID NO: 356 - DNA, 1095 bp, Borrelia burgdorferi s.s.
atgaaagaaattggaatatccatataccccaatgtaagtcctaaaaataaaattattaaatatcttgaaaaaagtgctcattttggatttactcaagtatttacctctttgctctatattaacggaaatgaatttgacatattcaaagaattacttagcattgcaaataaaaacggaatgaaacctattattgacgtaagtcctgaaattttcaaagaattaggcattgatctttcaaatcttagaaattgtccaaaactagattattttaaaaagcttggcgcctgggcaattagattagacaatacattcacaggcattgaagaatcattaatgacttttaacgactctgaccttaagattcaacttaatataagcaatataaataaacatattgatacaataatgtattttaagcctaatataaaaaatttacttgggtgtcataatttttatcctcacaaatatacaggactttcaagaaatttctttaaagaaacaacaaaaatatttaaacattattcaatcccaacagccgcatttattagctctaataatgcagaagaatgcgcacgagggaaagaaaaagaaggtgttcctacgctagaatcacatagatctaaagatatagaaacccaagcaaaagatcttttcaaagaaggaatagatacagtcctaatttctaattgttttccaagtgaaacagaactaaaaaaagtatcaaaggtaaacagaaatattttagagctcaaagcagacctaaatccagatgcaaattcagtagaaaaagaaataatccttgaaaatttacattttaatagaggtgacattaattcctatagaattcgatcaactatgccaagagtgtactacaataataaaaaatttcctgtacattctccaaatgaaattaaaaaaggagacatcctaatagattcttcagaatacttgggttatacaggagaacttcaaatagcactaaaagataccccaaataatggtcttgtaaacgtagttgggaaaataatcaatgatgaaatatatctacttgaaaaaatagaaccttgggaaaaattcaaaataatagaaaataaa

SEQ ID NO: 357 - DNA, 1590 bp, Borrelia burgdorferi s.s.
atgaaaatattgataaaaaagttaaaagttgtattatttctcaatttaattttacttatttcttgtgttaatgaaagtaatagaaacaaattggtttttaagctaaatattggaagtgagcctgctactttagatgctcaattaataaacgatacggttggatcagggattgtaagccaaatgtttcttggcattttagatggagatcccaggactggaggatacagaccgggacttgctaaaagttgggatatttctgatgacggagtagtttatacgtttcatttaagagataatcttgtttggagtgatggagtttccattactgccgaaggaataagaaaatcttatcttagaattttagataaagaaaccggctcatcttttgttaacatgattaagtccgttattaaaaatgcagaagagtattttgacggcaaagcaaatgagtctgagcttggaattaaagctcttgatgaaaaaactttagaaataacgctaaaatctccaaagccatattttcttgatatgttagtacatcaaacatttattcctgtaccaatgcacgttattgaaaagtatgggcaaaggtggacagaccccgagaatatggttgttagtggtcctttcaaattaaaatctagagttttaaatgaaaaggttgttcttgaaaagaataataaatattataattccaaagatgttgttcttgacagtattatattttttgtcacagataatagcattacagcttataatatgtatttaaatgatgagctggatgcaatttttaagaatgttccaccagatttgcttaaggatcttaagcttagggacgattattattcaatgggtattaattcaacctctttttattctttgaacatgaaagtaaaaccgcttgacaatgttaaagttagaaaggcgctgtcttttgctattgatagaaaaaccttaacagagagcgttcttaatgatagttctattcctacaagaagagcaactccagattatattgattactcttataaaagcaatttgagcttatttgatgctgaaatggcaaagaagcttttggcagatgcaggatatcccaatggtaataattttcctttattaaaagtaaagtacaatacaagtgatagccagagaaaaattgctgaatttattcaaaatcagtggaagaaaaacttaaatattaatgtacagcttgagaatgaagaatggtcaacatatataaatagtagagtaaatggtaattatgaaataataagatcaggatggtcaggagattatgctgatcctatgacgttcttaagcatctttcaaactgaaaatacatctttttcatcttatggatattcaaattctgaatatgatgaacttttaataaaatcagataatgagagagatatttttaaaagacaggaaattctaaaaaaagcagaagcaataataattgaaagagattttccggctgtatttcttaatataacttcttctagttatctttttagaaacgacaagtggaaaggttgggagccaaatatttcggaaagatttaatttatctgaaataaaaccaattaaa

SEQ ID NO: 358 - DNA, 1212 bp, Borrelia burgdorferi s.s.
atgccaaataagataacaaaagaagctttaacttttgatgatgtgtctttaattccaagaaaatcatctgtattacctagtgaggttagtttaaaaacacaattaacaaaaaacatatccctaaacataccatttttaagctcagcaatggatactgttacagaaagccaaatggcaatagccattgctaaagagggtggaataggaattatacataaaaatatgtcaatagaagctcaaagaaaagagatagaaaaagtaaaaacatataaattccaaaagactattaacactaatggagatacaaatgagcaaaaacccgaaatatttacagcaaaacaacatctagaaaaatccgatgcatacaaaaatgcagaacacaaagaagattttcctaatgcatgcaaagatttaaataacaagctaagagtaggtgctgctgtttctattgatattgataccatagaacgagttgaagagcttgtaaaagcacatgtagatatacttgtcatagactctgcccatggacattctacaagaataatagagcttatcaaaaaaattaaaaccaagtacccaaacttagaccttattgctggcaacatagtaactaaagaagctgcattagatttaataagtgtaggagcagattgtttaaaagtaggaataggtccgggtagtatatgcacaacaagaatcgttgcgggagttggagttccccaaataacagcaatctgcgatgtctatgaggcttgtaataatacaaatatttgtattatagcagatggcggaattaggttttcaggagatgtggttaaagccatcgcagcaggagctgatagcgtaatgataggcaatctctttgcaggcacaaaagaatctccttctgaagaaataatttacaatggaaaaaaattcaaatcttacgttggaatgggctctatttctgctatgaaaagaggctccaaatcaagatattttcaactagaaaacaacgaacctaaaaaattagtccccgaaggaattgaaggcatggtaccgtattctggaaaattaaaagatattttgactcaattaaaaggcggtttaatgtctggaatgggctatttaggagcagcaacaatatctgatttaaaaataaattctaagtttgtaaaaataagccattcttcattaaaagaatcccatcctcacgatgtttttagcataaca

SEQ ID NO: 359 - DNA, 636 bp, Borrelia burgdorferi s.s.; identical to SEQ ID NO: 91

SEQ ID NO: 360 - DNA, 1107 bp, Borrelia burgdorferi s.s.
atggaaaattctaaaaaaaataccctttgccaaaataagacacaacataaatcaatagttcttatctcaacactagagtatataaacaaaacacataataaatacacacaaaaaaacatactctattactttaatgaaaatcttaaaagaaatggtcaactacccgttaaaataaaaacactgcaaaattatctttacaaattagaaaaagaaattaaagtaacaactaattatcacaaacacttaggagtaaattgcggcaccgaaatatactatcaacttaatttttcaaaaaaagaatgttaccaaaaaatctataaatactttcaagaaaaaaaagatttaagatttcaaaatagagctacaaggggccttaaagatagatttactaaaaatgggagtgtagatttaaaggagtgtttaaataataaaaataatataaaagaagaaagaaagattaatgaaatagaaaagtatcaagtaagaaattacttcaataaatgtaactttttatgtaaaaaaattctttcaatttttcttacaattttattcaatttagatattgataaagataatataatcaaaatacttaaaatcataaaaataatagaaattaaattgctaaaaaataaaaatatacattttactaaatcttgcatgaaagaaaaacaagaaaaattaaagaaaattctatgcaacactcaaaaagaatttgaaaaaaatgaatataatcctaaacaattagaaataagtttccaaaaaatatacgaaaattacaaatttaagcctcattttattattgaaagtcataaatatagcgatttaaacaatataaagcgtaaattagagaagtcaattgaaagaaaaaaagaaaattctcaacaaaattatcaagatttaaaaacaaacattttcaatatccttattgaacaactaaaaaaagaagtaaatattgaacttctaaagccaattataaaagaatatttgaataaccaaaagaaaatagaatacaataaagtgttttgcacatattattgcgaattattagaactaataaaaaaccaaaaaagtttattgaatttaaaagaattagatagaaaggctata

SEQ ID NO: 361 - DNA, 3294 bp, Borrelia burgdorferi s.s.
atgaaacttgatgaaataataattccgctatcaatgtcgatcagcaataatcaaaagctggacgcaatagcagaaactctaaaaaaaattgccgaacaaaaattttcaagtctggatgatttgaagtcaaaattagaaaaatctgctaaatctggatccaacttagagaaagcgctaaacaaaagttcgcagaatgctattaaaaacttcaaatctcttgcaaattctgttaattccgtaaattccaaagctggcagcatgaaaagtataggcaaagttctaaaaagtgttggaaaaggcttaggaagtgtaaagaatttggcaaacaaaactggtgaggcattcaaccaaatgttggcggcttttgccccaattattatggctgtaaaggctatacaagcaatcggctctacaataagtggaatttttgatggcgctatggatgctcttgatgaattcaacgaagaagtgtcaacgttttctgacatgcttggaaacgaagaccttggaaaatctttagcagaatccatgagggcttttggcgatgaaactctttttactagagacgctattgctaatgctactaaaacaatgctttcttatggtgcaactgcgagtgaagttgaagagagaattagaatgtttggggaggctgctggtggaagtagcgaggggcttgagaaattagccgaagtatattctcgtgtagaatcgagcaatcaagtgaatttagaagatttgtatgcacttcgtgacgcgggtgttgacattacagacattttggcagaagaagctggtttagctggagaggcattatataaggcagcgagcgatggaaaaataggattcgacgccctaaataaagctctttccaaagccactagcgaaggtggtaaattttatgggaacaccgccaaagaagcaaaaactttagctcaagctcaacaacaaactgccaaaatgagcgaaaagcttttcttagacattggaaaagctctagagccaatgatgattggatttgaaaaagtaaaacaatttcttatggtagcaatcatggttcctttgaccaaggtgactacagctacaatatacttaactaccaaattgggtgagcttgtagcatatcttgccggcaagtgggtgcaaggcatgaaaatgttgttcaaggccattaccacgccctttgttaagctctacgagggaatcaaatacgtaatcggcaagctaaaagaacttgcaacatatgtttctagtggatttttagatcgttttaagggtgcgtttgagcccattatcaaatgggttcaaaagttgatagatatgatatccaaagcgtatacaaaattgaaaaatctggttactttttggaaaaaagccgaaaaggaaaaagacacttctggttccgaacccgaaagggataaaaagtttgatccaaatgcaaaaaccaatattaacaagaaaatggcagaagactatcaaaagctgcaagacgaaatatttaataggcagagggacatctataataagaccgggaaagcacgagaacaagccttaaggaatcttgaaaaaaccataaatgaaaaaaaccaaaagtttaaggatgaatactccaaaatatttgatcagttaactgacgagaacaagaaaattttagtcggagttgaaaaatcagtaaatgagttcaataactccaattatgattttgtgaatgagtaccaaaatttactaaaagaaaaagaaagtcgtgaaagggaaataatcaaaactctgccccatacagatcaagtaagcgctttacagaaacttaatgatgaaatcaatgaaaagaacaaagcgttcgtagaaaaatatggaaaaagtttcgaaactctgaacgagtctaacaggcaagttgtagtcgcacttgaaaagcaggttaatgaatatgaaaaaaccgctttagatcgatcttttgtcgaggctcaaaaagctctgcaaaaagaaataaccgacttagagtgggaaacaatgctacttccagcaaaagaaagagcaagtgctgaaaaaaagatggcatccaaaattcaagcaatgtataaaaaattcgtggatgagcacaaatcgcaatttaaaaagctaaatgaaaccaatagaaacactataaaacaatatgctgagaaagctcaagatacgacaaaaagcttatatgacagcatgatagacggcctaaatgtctttaagaatgcctttatgaaagatatagcgggcaaatttttgaataaggatacgggagaaagtattggagaagaatttcataatttgattaatgggaaggatgtgaattggggtgaaggtctggaaaaaatgacaacacaaatgtacgaatcttggaaaactggattaaaaactgctgctggagcagtttttggaccttggggagaagctgttgcggagcttataaacggattgaccgattttgtttggggaattttgaaggggcaagaaaaagcgagaattaaagcaattgaaaaaaaacgggacgaagatttggaagaacttgaaaaacgaagtgaagtcgaacttaaaaagcttgaagatcgttttgatgaagaaatcaaaatgagaaaagaaaaattgagcgaattagatgatgaatacactaaagaaatagaatttctcaaacaagctcaaagtaaaggacaaatatctggtgaagaatttcaaaaaagattacacgatgtacaaacagaatataaaacaaaaaaagatatagaaaccacccaacttactaagaccgaagaggctaaaaaactagaagtagaacgcaaaaacaaactttctaaactagagcccgaacgaataaaagcacaggccgaagttgataaggtaaatgctgaagattggtggaatttgggcaagcctgataggttaagaaaaacacaaaaaattttagacgaaatactaaaaagaattgcaaaagtaaaatcagctggatctattgaagagataaaacttgctcatggcggtgcacgatttgtttcaaataaaccgacatatatgccaaactcaggtgtaatgtctagtgagtttggtcaaccagaattagtaagaataactccagcaccaatagatgaaaatctacgcaaacttgaagctaaaattattgcagaagaaattactaaattacaaaaaactcaaagcagtacagttgtaaataatttttactataactttaatggagatgtgcttgatgctgagaaattagttagaatgctaaaatcaaaagaacatttaatgggattcagaatggcagag

SEQ ID NO: 362 - DNA, 426 bp, Borrelia burgdorferi s.s.
atggtaattaatgttaatttgactggcagggtaatgttaccctatatcccagactatattagaaacggcaaggaaaagatcaaagaagaagagaaagcatatgtggttttgaaagacattaactatgggtttgtggaaaatctaaaggcaagacaaatcgaacttttcaaaaaattgaatggcgagaatggtaaaaccaattccaatgctatgattgagtcaacaagcgctcaaattcaatttgtaaaaaaaatttgggatgaaaatgtggtaggattcgtcggtcttgaaaatcaacaaggagaggttatcaccaaagagatggttgaaggtgacgctatcttgtttcaagacatgctttcaagtcttgcaatcgaaattaattttctggcagatactctaagggttgagcgtgtttcaaaaaag

SEQ ID NO: 363 - DNA, 1188 bp, Borrelia burgdorferi s.s.
atgagactaaggcgacttccagtatatgttgatgcctacaaagaaaagcccaatgctgaaattttcatatactactcaagtaggggaactggtaaaacctacgacattgcaactgttaatttagaaagaaaatttagtgctgatggcggagatacccttgcaattagaaaaaagaaaaacaaaacaacacaatcaatacacaaagaaattttagaacttttaagcatatacaacttaagaaaatttttcaatataagcaaagcaaaaattgaaagtaagagtttgatttttgggaaaaaacgtgcttttgtttttgaaggggggcatgatacaagagatttaaaatcttatgcgcattttaaggacttatggctggaagaagccaatcagtttagcgctgatgatatagaaatgcttgtccctacaatgagagaacaaggcggcagaatctatatgtcaagcaatccggtgcctaaatcacattggctatacaaaaggtacttatcaaatcaagacaatcctgctgtgtgtataatcaaaagcacttaccgtgacaacccatttttaaatggtggagacgtacaagcttggcttgaaaaacaaagacttgcatatcatggcaatgacattggttttagaattgaggttttaggagaagagtttgattttggtacagcaaggctaattaaaaaatttaatgtgtgtggtcccgaaattctttccagagctaatggaagctattatacaggaatacacgttaaaggcaacagaatttgttttttagaaattcttgttggaagaatttcctatcttccagttgtaattattacaaacgcatgtagtaaagttttactatcaaaaactgattaccaatccgaaattaataaatttaaaggggtttttgtattgccaacagcaagagaagaactcaaatatgtattttctcgttttggtagaggtactttgcttgcaaaaaaacgaaacttgtattcactctcagactatttgattccgtctaatcttaatgtggtaaacaaacccgaaaccactgatgtaatttcagagttcaacgaaactgaatattattatgatgaatctagtgcagaagatagcgaagttacaaattttgttatgcaaaaagatttggtatacatcccggcatttctcaatgccatatcggtttttagc

SEQ ID NO: 364 - DNA, 780 bp, Borrelia burgdorferi s.s.
atgttaagtgatgatgattttgaaaacatcaaaaaaagacttcaagccgacaatatcaaaattcaatttggcgttggaactatggaagaagcaaaaaattatgttggcaaacttggcgaacctattgttgttaaagataaagaattatttgctatttgcaatggtaaagatactactaatagaaaatattatcccattaacaagaataccaagccccctattggcgaaaatatagatgattatttaaaagacttagttaattggtgtttagaaaacacttatcctggatttttaactgcagaattcgtcgagcaaggatctatatcaagaagcaagttggtacaagcttttgaagatactaaaaaattttgtattccagatggaagacctctcccagacaattgttttgtaaaagaaaagtttggaatatctttggcacctaagttgtcgggcagattcttgagacactatgattctggcggctccaccgattctgacggtacaagaagcttagggcatacacaagaagattcttataagagtcacgatcatgatcttgacttgagcgtattggatagtctgcgagggcgacttgtgactgattactcctccatcagaagagattctaattggagtacaggctccacctcttttgttactcatatagaatacggtgaaccaatacagtcgtggcgatacccttcctacacaaaatacagtggagatgacgaaacacgacccaaaaatacatgttatatttcattctacagatatgattgg

SEQ ID NO: 365 - DNA, 2688 bp, Borrelia burgdorferi s.s.
ttgtatttgggtgttacaaaaaatacagcagaagataaggattgtattaagttgaaagatcaagacaattcaagtcaagaatccgaagccttaaatcaagaaaccgaaaaaggtgccgaaactgaagaaatctcaaatcccaaagaagatacatcggaaaattgtacttctttggggcttgatattgtattctacacggacgagggtcaaatttttgaacttaccccttttgttgacactacaagcattgttctagaagaaaaaatagttgatccaagcctaaaaacagcagcaagcacgttcagctttagtgtaagcggcctatcagaagaatttttgaatttcttattcttcagaaacgaagacattttcgtaaaagtaaatgataagaataaccccgtttttaggggaattctagaaaaatttttcagcagagatctgttcaatagcaccaaaagtgtatcattcaccgttaacgactactctagcctactaaagattgcattcgaaaatccagttcaattcccaatcaattttttaccagactggctttttgtatacaatcctttagcaaaagaactttcacttgtccatctaataatagaaaaaactaaactaaaagaccttattgatgatgatgctagcgaagcaatacttgacaaagtccccgctgtaatcattgattctggagaagatgtagaaactattttgcaagccttgttgtatgaattcggatacgcatacactttctcttcagtcggcaaactacaaatacttccaatttggaaaagcgaagttattactaaagaaattgaaatttgtactgtggatgctgaaagttatgttatgtcaaaaagtagctccagtagctacgattcaactaaagttatttggagagaaggcaaattccaaagcaaagaagaagcaatgtccaaaaaacgaccactgtactcagccccaatcaatgttgctggtaccgatggtgcactgtacgttgcagttcttcaaaaaggcgtagtgtaccccgactttgcagacaaggtcggaagcagtgtttttcaagaatacgatcctagctggttagatacagtttacaaatgggacttcaaaaggcgcgaggtttggcacgaccactacgccataaatgaacatttagcaataatctcaactcataaccttgaagtaaggtttagtgccgactcctccatcaagcttgaaaataaagaatattttccaacaaaggctaagctttggtttagaaacacttctagtagtcaaggctccaaatatatttaccactttgacatttatggtgatgttttctacacaatagctcaaaatgtactccaaaccgacaatgctgatgatttttactctaaaaagtttgaatacacaaccagattcattttttccgaagattcagcattaagactttttgaattcctaacaaacttacgtgtcaaaggacacactattgttaattttaggtcaatgcagaatctaaatataaccgattttgtcaaacttagacttgacaatattgggattgatcattttttccttatactttcaaaaaaaattactaatttcgatctggatatcaaactttacgagtacgagggaatcacttggggtgactacactcattacgaataccttacaacttcaaccaaaataggaataagcgactatttgtctggggctcacaaagttgttattgcaccgtttaattatgatggggccgaaacttaccaatttaaagcctccgggtttaaagacgaaaatactttaaatggttcaattgaatttgcaaaacaagctggacttaacaagatcaaactacttaaaggcgatttttacatttatgatcaagtaaaactaaacaatttagaaatcgaaggcgatgacgaagttttcataagaagcacggggttttctaaacatatttttacatcagaaaaatcattcaggctttctggagtcaatatatgtcaacaaccaatgagtgaactttacattaacggaggagatctaaaccaacaagaactggcaccttacctagaagacaaaagctttacacagcccgctgttgtagtgctctgctcatcatattcattgcaagaagaggccagatcatcagtctatgttacagatgcaagctttgtgtacatcaaaaatgtcacatttacgtgcgcattaaacaaagcattgcatttcaaaaaaacaaaaaaaattttacttgaagatgtaaattttgattctacaaatcaaagttttgacatagaaaatgttaccaatctaacactaattaatgttaatgctcaaggaagcaaaactgcatcagttgcaaatggacttaatgcaataattagagaaagcttctttaccaacaacaccaatgcgcttaagctttccaacttttcaagtttgaaaataaccgacacacagtttatcaaaaatagcggtactgcgctgcatttacaagatattactagcgcaagactaagtaacaatacgtttacagaaaataaagttggacttgaaaatcatgcttttgacttgatcgtacgcgatacttttgtaaaaaacacacttgcccttaatttagcaagaaaatcaaatgcaggggtgcgaacacttgatcttagcacttacatggaaaacactaaagacaaacaggaggttgct

SEQ ID NO: 366 - DNA, 426 bp, Borrelia burgdorferi s.s.
gtggctttaggaggtaaaatgagaataagaatgaaacatttagtaagaaggctttacttaagaagggacaagatttggcatgtttacagaagtacggaaattcaaaacaaagctaaagacaaaagcattactaattttcctaaattagaaccagaagattttgactatgagtatatttacaagttcgtggatgagtggattcagaagaaatacaacgataaattagggtttaccatccaaaaggtagatggtcttgaatatatttgtaaggcaaaaaggtatgcaagtttaaagaaaatattggctaggattgtcaaagactataaagatatatttcttggcaggttgcaaaagaatgttgctggtgcacaagcgggatccggggggagtggaggtaaggggagcaagccggcgggaacaggagga

SEQ ID NO: 367 - DNA, 666 bp, Borrelia burgdorferi s.s.
atgaaagcagttttggcaacgacaaatattaccgaagatcaaatatatagagagtttctgcgactaggaatggaacagttaatagctcaagatttgtcaaaaagatattatcacaatgagcttacatatagagatttggaaaatttagaaaaacaattcggtataaggttcgagaaccttatttctgagatttcttttttagaaaagaatttacaaaaagacatatttaatttagatgctaagatagattctgtagaaaagaatttacaaaaagacatatttaatttagatgctaagatagattctgtagaaaagaatttacaaaaagacatatttaatttagatgctaagatagattctgtagaaaagaatttacaaaaagacatatttaatttagatgctaagatagattctgtagaaaagaatttacaaaaagacatatttaatttagatgctaagatagattctgtagaaaagaatttacaaaaagacatatttaatttggcacaagctcttaaaaaagaagttcaaattaatagtcaatttttattggaaaaactcaaggtgagcaacagaataataattattattacagtaataatagttcccattgctatatctagcataacaaatattgttatgctactaattgctaaattttttaaa

SEQ ID NO: 368 - DNA, 3831 bp, Borrelia burgdorferi s.s.
atgaaaactaatgatatcgtaaaaacaaataatcctaatatatctctttataaacaattatcaaaagactttataaaaaaggaaaatattaataagctaaaagacttttttattcttataaaaaataaacttttttcaatagatgataattccacagaagcaaatatagagtctttgctaaagtatatatttgaagaactaaattattcagtagaacaacaaaaagccggtcaaatagaaggagtggagtctagagtagatatactgctttttgaaaacgacaaagacaaagcatcctttaataataaattaaaagaagctaaaaaaaataatgaacctattcctatcgaagatatcttgattatagcagaggttaagcgcccaacatttagttttgatgctaaagataaattaaaagaatcagaagatcagctatatagatatctaaatcaatatcaaaaacattatgggatactttcaaatggaaaggtatggagattatatgacaaatcgaaagtactttatggagaaaaaagatatattgaattcaattttkctaaaattgaagaaaaagaagaatataaggaacaagaatggtttgttttattcatctaccttataagaaaagaaagatatctaaagacaagtaatgtaatagaggttgaaaaagaacaaatagctaaagaaaaagagataattcaaaaaactctaaaagagatactttatgagagacccgacgactctatagtatttaaaattgcaaaaaatatatatgacaaagaatttaaattatcaggcaaagaaattactcagcatattttagctagcattcttgaagaatcaattatttttattttaagaatattttttattgcatatattgaagataacgacatttttaagaaaatattacaagaaaataagctatacagatcttctatatcttttagatattttttttatgatgaaaatacaaaaaagaaattagaatataaaaaaataataacaattttcaatttacttgataaaggaagtgatgcaataaagtttcctgtatttaatggagggttattttcagaagataaggttaaatatttaaataatgaaggtttgctcagtattagcgagattgaagaaatactagttaaaatgcttttctttgaagaaaaaaatattaaagatgaaaaatttgtaaagtattcaaggttagatcctaaaagttttggagaattatacgaaactctacttgaatatgacctaagaattgcagataccactgttcatcgtattattgaagacggagtttaccttattcgtactgaagaagagcttgaaaataagaaagtaaacaaaattgctacatatcttaaaggtaatatttatcttacatctagatcacttgatagaaagaaaagtggggcatattatactccagatgacttgactgattttatggtcatatcatcaattgaagagcagcttaaaaccaaatcccctttagatataaagataattgataattcttgtggatcagggcattttttaatttcttgtctagattacttaacagaaaaggtatggtacgagctagataaatttgaagatgtaaaaaaagaacttgatgaagaatatagggttattattgaagaaagtgaagagtatgatgttcaagatagtataagtaaagaattagtacttaaaaggatgttactaaagragtgtatttatggtgttgatattaatcccatttcagttgaaattactatgctaagtttgtggattaatacttttatttttggaacaccactaagctttattgaacatcatataaaagcaggaaatgccctgctaggatataccaaagatgaattctttgatattgtaaaaaagaaatttgaaagtggattttctttgtttaaaaaaagaattaaagaaattataactattttagaagatatttatcaaaaaattaaaggtattaatgatactactaaagaagatatagaaaaatctaaaaagatatacaaagaatatgaagaaagtaaagatatagataatttaagaataatattttctttaattaaactttattcattatcttttgataaatctttaaatatggaatttagtgatattgcgtctgtaattagtttaattgaaaatattttgggcaataaaacttctagtgaagataaagaaaaaatagaaaaaattagaaaattaagtagctactataaattttttcactatggaattgaatttccagatattcaagaaggatttgatattgtaattggaaatcctccatgggagaaaactaaatttaatgaaacagagtttttttcaaaacatattcctaactacagaaaactaggcataaaagaacaaaatatcataaaacaagaaatacttagtaaagataatcatcctttgagtattgaatacaatgaagaaaaaaatagtataattgccattaataatatttataaatttgattttaaatgctttactagtggtggagacccaaatctttttagatactttgttacatttaatttaaaattaataaaagaaaaaggtaatttaacttatttagttccttcagctatttggaatgaatctagttctagaatactaagaaaacatatatttgctcgctataaacttaactatatttatcaatttgaaaacaaaaaaagatttaaagatgtgcattcaagttttaaatttgcaatatttcaacttagtaatattaaagaatctacatcgagctttaaagcaaaattcatgattcagagtagtgataatattttaaaagaaataactagggatttgaaagatagtaaagacgatgcttataaaggaattgaattaaatataaatcaaattaagaagctatctcctattcaagaatcaataatagaattcaaagacaatgaagaatttactcttattaataaaatgtttagcaaatttagtgctcttggtgaaggatatattgattttaaaaaaggcttagatccaagcattaagaatcgtaaatctttattaaaagaatgtaataataaaaatcttatatttctttattctggagctaatattcatcaatttaattcaagattttttgaagataaagatgcaaaagaaagctctaaattgctatggatagataaagaggatttggaaaaggtattaactaaagataaccaatatcaaaccgaaagagtattttatagagcaattgcaagcaacacaaatgaaagaactatgattagtactttatctcctggaaattgttattgtgtgaattcaatatatataaatgatgagaaaacaccaatatcactttataaaaaattatttattatatctattttcaactcatttgtatttgactttttgttaagaagatttgttgattcaaatgtgctaaaatcatgcctttatcaatgcccaatgcctcaacccgaagaaaaagaaattttaagtaatcctttatatttaaatcttgcaaaaaatacttctttactgatagccaaaaatgatcccgaaaactttaaatatttactttacttagaatattttaagtttgataaagaaaaagttaataaaatactgaaactagataaagaagatgaattttttaaagaaaaagaaaatgaaaataattttattatagctagtctttactcattagctaaggaagattttatcaccttgcttggtgattttaaggcattaaagaataaaaaaaaaggagaagattatatttcttctttaataaaaggatatgataattatttactaaataataaaattttttatcataaa

SEQ ID NO: 369 - DNA, 834 bp, Borrelia burgdorferi s.s.
ttgaaaaactttaaattaaatactattaagcttaacgttattacagcaatattaactttaatttgcatatcatgtgcaccttttggcaatgttaatccaaacaagctaaaaaatcctatcacctctaaaaacctaaaaaaaccaaagcgaagcaaccattctagaaatctaaaaaaaacaaacagtcacaccaattcagaaaattcagcagaaaataaccaaaatcttgaaaatgaatctcaaaattcaaaatcttcaaatcaaaatcctcaagaagaaactgcaatctcaaaattagaaaaaattggtaaggacctggaagctcaaaaaaaggaaaaagatacacaaatagaaaaaattagtagtgatgctcaatatgattttctagagaattttaaacttcacaactatgattattttatgcataatacaaaaatgacattaaaaaaaataatttactcatccctaaattacgaaaaagaaaaaatattgacattaaaagaaattcttgaaaaacttgatacagaagataataaccgaagaatagctggtcaatttttagaaacatcaagggatattcaacttcaacaagaagatttgattttaaaaaaaatacaagatacattacaaactctaagcaaagaaaaagctgaagaattactacaacacgcagaacgcgatttaaagataaaacaaaactttgtaaaagctttaaacgcaactattgaggcttacaataaaaattctgataacattaaaatagataataaagcgctagcaaaccacatggaaaaaaaatactcccatcctctttatctactagatcaagctgat

SEQ ID NO: 370 - DNA, 1062 bp, Borrelia burgdorferi s.s.
atgaaaaaagttaaaagtaaatatttggctttgggattactttttggttttataagttgtgatttattcataagatatgaaatgaaagaggaatcccctggcttatttgataagggaaactctattttagagactagcgaggaatctattaaaaagcctatgaataagaaaggtaaaggtaagattgctagaaagaaaggcaaaagcaaggtttctagaaaagaaccgtatattcatagtttaaaaagggactctgctaataaaagcaattttttacaaaaaaatgtaattttagaggaagaaagtttaaaaactgaattattaaaagagcaatctgagactagaaaagaaaaaatacaaaaacaacaagatgaatataaagggatgactcaaggaagtttaaattcccttagcggtgaaagtggtgaattggaggagcctattgaaagtaatgaaattgatcttactatagattctgatttaaggccaaagagttccttacaaggcattgcaggatcaaactctatttcatacactgatgaaatagaggaagaggattatgatcagtattatttagatgaatatgatgaagaggatgaagaggaaataagattaagcaatcgatatcaatcttatctagaaggtgttaaatataatgtagattcagcaattcaaacaattactaagatatataatacttatacattattttcaacaaagctaacccaaatgtattctacacgccttgacaactttgctaaagccaaagctaaagaagaagctgcaaagtttacaaaagaagaccttgaaaaaaatttcaagaccttattaaattatattcaagtaagtgtaaagactgcagcaaattttgtatacataaatgacacgcatgcaaaaaggaaattagagaacattgaagcagaaataaaaactttaattgcaaagatcaaagaacaatctaatttatacgaagcatataaagcaatagtaacgtcaatcttattaatgagggattctcttaaagaagtgcaaggtatcattgacaagaatggcgtttggtac

SEQ ID NO: 371 - DNA, 972 bp, Borrelia burgdorferi s.s.
ttgggaggatttaatatggaattatttgatgaaaattattatgcaaaagctgtggcaaatattataggagaagttaaagatcctataatgtataaatggttttcgcctgatcaaattgaagatgttgatcttcagatgggctaccaaagaactgtaaagtgggatgcgtttttaaatgctaatcctacaacgattgctaatgaggttaatactatttcaactattggatttagttctgaagtggtaagacttaattacttaaaattacagtacaaatttaggcacttaaagcaggcgtctgaaaaattttacacttcagactcatatcttggtgacattaataacaatttacttcctttctctcaagcctataagcttgcaagtagcgagattattaaacttattaatcactttgtactaacaggcactgtttcaattcaaaaagatggaaaaaatcaaaaacgtctacttcccaatatgtatggacttcttaatatgccacatcaagtaaaagaagaagttgctagtggtgataaagataaaatggataaaatatttgaaaaaattgaggcgggactttcaaagttagagctaggagacgaattttctacacctatgatggtaatagttgaccctacaacttcgctcaaactcgtaaagccatacgcagcagcacagggtgcagcaagtagctgcgaaaaatgggaggatgttttgattcaaactatcaaggctattaataatagagaagatgtctacattgaaacttcaaacttgctaaaacatcaaatacttatttacccattaaacccagagcttattaagtttaaacctagcaagtatatgttacctacaccaaatgaacaagtggataaagattcaactgatattgctcattcatacattgattttgttttaggagggttacttgctactagaaaaactattttgcaagtacatattaaacaaagt

SEQ ID NO: 372 - DNA, 714 bp, Borrelia burgdorferi s.s.
atgaccataagggaaaattttatggaaacagtgtcaacaaatattgcaagtgtaactcaagaacaaatatataaagaatttattagactgggtatggaacaactaatagcacaagatttatctaaaagatattatcacaatgagctaacatatagagatttagaaaatttagaaaaacaatttgatataaaatttgataatcttatttttaagattgatagcgtagaaaagaatttacaaaaagatatatccaatttagacgttaagattgatactgtagagaagaatttaaatgccaaaatagatggtgtagagaagaatttaaatgccaaaatagatggtgtagagaagaatttaaatgccaaaatagatagtgtggaaaagaatttaaatctaaaaatagatagtttagatactaagatagatactgtagaaaagaatttacaaaaggatatatctaatttagatactaagattgatactgtagagaagaatttaaatgttaagattgatactgttaaaagcgaacttaatactaaaatagacaatgtagaaaagaatttacaaaaagacatatctaatttagatgctaaaatagataatgtagaaaagaatttaatgtctcttacagaaatgcttaaatgggtattaggaatcatgggagcaatgtctatcacaatgatagccgggctaatatttgctttcatttctaaa

SEQ ID NO: 373 - DNA, 561 bp, Borrelia burgdorferi s.s.
atgagcgatggtattacaaaaataaaagaagagtttgataaaaaagttgcagaaattaaagcattaatgaaaaatcctcagcaagatactggtttgcttagtaattctgtagattttagagataaaaatctaatttactccaattcggatggagtttttactagtagtaaagacaaaatagaaaattatcctgctaaagggtatccatacaagcgtggagtcaagcttagttttagtgcagatggtacaacagaactagaagttgaggctggtggtggggatgacttgtacggaatatgcactgatatagatgagtttactggcatggcaactgtagttccaattacaaataacttcacggggtatttaacatttaagaaaaatggaaatggtgtaaacccaggtgataagctgcattttaatgcacaaggagagcttgaaaagaatgggggaaatgataaatctgttaatgctatagcactttcaaaagtacataaattaaccgaagagttatctatagtgcttgctagtgtttttgggaatagagctttaaaaggtaat

SEQ ID NO: 374 - DNA, 1293 bp, Borrelia burgdorferi s.s.
gtgagcgacaaattcaccattaaatttaaaggtattcttgatcatgctgcaacaaaaaaggccattgaacaagatatttctaaaatggaaaaatatcttaaacctaaaaaatctagtttgggtagcactaaagatattgtaaaaaataatttgtcggacaagaaaaaagaacttagtagacaatctaaatttgaaagcttaagagagcgtgttgagaaatatagacttacacaaactaaaaaacttataaaacagggcatgggatttgagaaagctagaaaagaggctttcagaagatctttaatgtctgatagagacaaaaggcatcttgagtataaagaacttgcaaaagaatcaaaagcaaaaagtaaaatgttagcggcctctcaaggaaaaggacttgttgccaaaattgcaataggtagtgccctaaggaatatcattagcaacgctatgagtaaagttggaggaggccttttaggttttgctaaaaaagcagttgaagaagacaccaaaacaaaaagaacaaaacttctcaatagtgcattttttacagataacgaacgaaatatgattatgggaaataaagacaagaatactaagggaattcttgacggaatgaagggatttgagcgcgacttagaaaaagaagaattcttaaatcaagcaagtgtctttaagggtactttaagggacttagatatgttaaatgaaactaatttgaaaaacgcagtagaatttgcagctatgcttaaatccagtggtgctatgagcagcgaagatgcagtaaaggctgttaatagtgttcttgggggtgatggaagtgagctttttgatctattaaagaagtcaggtgttggagacaaatatatagaagatgccaaaatggcctggcaaagcggggctcaagtagatctagattccagaattaccaagatgatggaaatgttcaaggattttaaatctttcggccttacaaaaaaagtcaataatgctgaaagtattcaaagtaatttggcttcagctgagcaaactcttcaaaacttaaccaccactgtcttagacccaatacttggcctcgttaataagataactaaatactttgaaggctttaagtttgaaacacacattattaatcccataattgatggcattaaaagtatttttaatcttaattatttctttgcaaaattaaaatcgatgctacctggatggatgggcggagatgagggtgcggctctaaaaaaactacaagaagaagttcaaaatcaagacaatgctaacaacactcca

SEQ ID NO: 375 - DNA, 768 bp, Borrelia burgdorferi s.s.
atggagcaacttatgaataagaaaatgtttattatttgtgctatttttgcgctgatagtttcttgcaagaattacgcaagtggtgaagatgtaaaaaaaagtttagaacaagatttaaaaggaaaagttaagggatttttagatacaaaaaaagaagagttttttggagattttaaaaaaccagaagcaaaagttcaaccaaaggatgaagaatctatgcaagctgatgagcctcaggagcagggcgaagatcaagtggttcaaggtgttgctgaagatcaaaaattaaaagaagaaattgaacaaaaaataaaagaattaaaggataagatagagaagtcggatcctaaaagtgtttctcttaaaacatattctgattatgaaaaggaaatagaagaattaaaggaaaaactaaaagataaagaaaagtttgaaaaagaattagaaatccttgagaaagctttaaatgaaaaaatagagaaaagaaaaaaagaattagaagagtctcaaaaaaaatttgaagaacttaagggtcaagttgaatctgcaattggaataactgatggagaaagggctaaaaatcaagggaaagttggaatagaagccttgcggcatgctcggggtttgggctttaaaaatatttctagtggtaatagtactagcgatatagctaaagaaataatagtaagctcgcttaaaaagattgaagaagagcttgaagagcttaaaaagttagagaaagaatctaaagattctaataaaaaagaa

SEQ ID NO: 376 - DNA, 537 bp, Borrelia burgdorferi s.s.
atgagaaatttggtgcacagaacatatgatatagaaagcataaaaaatgaatttttaaacataggatttagtgaagaggcaatagattttgtttttcttcataatgataattacaactatgaggttttaaaagagaaaataattgatgtagaaaagaatttgcaaaaagacatatctagtttagatactaagatagataatgtagaaaagaatttaaatgttaagatagataatgtagagaagaatttaaatattaaaatagatagtgttaaaaatgaacttaattctaaaatagatagtttagatactaagatagataatgtagaaaaaactttgcaaaaagatatatctagcttgaatactaaaatagatagtgtagaaaaaaccttacaaaaggatatatttagcctagataataaaataaatgttttaaaaaacgaacttactgcaagtaatagaacaatacaagtaattttaataatgggaataacgcttgctccaattatttattctatattcaataagcattttttaaat

SEQ ID NO: 377 - DNA, 687 bp, Borrelia burgdorferi s.s.
atgaataagaaaatgaaaatgtttattatttgtgctgtttttgcattgatgatttcttgcaagaattatgcaagtggtgaaaatctaaaaaattcagaacaaaatctagaaagttcagaacaaaatgtaaaaaaaacagaacaagagataaaaaaacaagttgaaggatttttagaaattctagagacaaaagatttatctaaattagatgaaaaagatacaaaagaaattgaaaaacaaattcaagaattaaagaataaaatagaaaaattagattctaaaaaaacttctattgaaacatattctgagtatgaagaaaaaataaacaaaataaaagaaaaattgaaaggaaaaggacttgaagataaatttaaggagcttgaagagagtttagcaaagaaaaagggggagagaaaaaaagctttacaagaggccaaacagaaatttgaagaatataaaaaacaagtagatacttcaactgggaaaactcaaggcgacaggtctaaaaaccgaggtggtgttggagtgcaagcttggcagtgtgccaatgaattaggtttgggtgtaagttattctaatggcggcagtgacaacagcaatactgatgaattagcaaacaaagttatagatgattctcttaaaaagattgaagaagaacttaagggaatagaagaagataaaaaagaa

SEQ ID NO: 378 - DNA, 450 bp, Borrelia burgdorferi s.s.
atgaaaatcatcaacatattattttgtttatttttactaatgctaaacggctgtaattctaatgataatgacactttaaaaaacaatgcccaacaaacaaaaagtagacaaaaacgtgatttaacccaaaaagaagaagtacaacaagaaaagccaaaatctaaagaagaactacttagagaaaagctatctgacgatcaaaaaacacatcttgactggttaaaaactgctctaactaaagatggagaatttgataaatttttggaaaatgatgaatcaaaaataaaaacagtacttaatcatataaagagtgaacttgataaatgtactggggataatgcggataataataaaaatactttcaaacaaacagttcaaggggcacttgaaggggacatagataaatttacagagcagtcagatagtacatgtggtggtggtaattcctaa

SEQ ID NO: 379 - DNA, 549 bp, Borrelia burgdorferi s.s.
atgaggattttggttggcgttttcataatagcagcattggctttattgggttgttatttgcctgataatcaggaacaagctgttcaaactttttttgagaattcggaaagtattgatatgggttccgatgagattgttactgaaggcatattttctagtttaaaattatatgcgtctgaacatcgtttattggttgagataaaaaagactttaattagtttaaaagatcctaattatcgtgatgtacccccagtgcgtgactataatgaggagtattttaataaattctttttagatttaggttctgagcaatctaaagacttgattaagttgtttggtagggtaaaaaatgagcagaataataaatttaaaagtgaagtttattggctgtattcatgtataagcgagttatattctccagatattaagtattctggcgaagaggggagccctgagtatgatcgttttatgcctagacccactgcttatcaacaatatttaaaagtgaagagagaaatagaaagaaatacaattaatggaaaaatttta

SEQ ID NO: 380 - DNA, 333 bp, Borrelia burgdorferi s.s.
atgcaaaataacactattggtttaggacttaatttactatccagcttaactaacatagctaaaactgatacaaacatagatcataattacattaatacttttagtaaagtaatagattttttctacaaaacatatataagcacactaaaatctatggaaacagctgagtcaactaaaatatttgaagaaatacaagacattttaaaatacaacattgagataatagaggctatctctactgataaaagcaaaagaattatcacttcacttaaagcaacacgtaacaaaatcatgaaagaatatatcaaaatacttaaaagaggtgaaaatgct

SEQ ID NO: 381 - DNA, 627 bp, Borrelia burgdorferi s.s.
atgaccataagggaaaattttatggaaacagtgtcaacaaatattgcaagtgtaactcaagaacaaatatataaagaatttattagactgggcatggaacaattaatagcacaagatttatctaaaagatattatcacaatgaactaacatatagagatttagaaaatttagaaaaacaatttgatataaaatttgataatcttgtttctaaaatagatactgtagaaaagaatttaaatgttaagattgatgctgttaaaagtgaacttaataccaagatagataatgtagaaaagaatttacaaaaagatatatctaatttagatactaagattgataatgtagagaagaatttacaaaaagatatatctaatttagatactaagattgataatgtagagaagaatttacaaaaagatatatctaatttagatactaagattgataatgtagagaagaatttaaatgccaaaatagatactgtagaaaagaatttaaatgccaaaatagacaatgttgaaaagaatttaatgtctctttcagaaatgcttaaatgggtattgggaattatgggggcaatgtctatcacaatgatagccgggctaatatttgctttcatttctaaa

SEQ ID NO: 382 - DNA, 276 bp, Borrelia burgdorferi s.s.
atgagtaatttagcctacaatgctcttaaaatagaaaatataaggttagaatttttaaataaggggtttagtgaagaggcaatagattttgttttacttcagaacgacaattacaactttgaagttttaaaggagaaaatgaattctttagaacaacaaataattaatgtagaaaagaattttcaaaaagatatagatagtgtaaatactaaaatagatagtgtagaaaaaactttgcaaaaagatatatctagtctagacaataaaatagatatt

SEQ ID NO: 383 - DNA, 558 bp, Borrelia burgdorferi s.s.
atgagcattaaaaataaaatgataataaccaaaagaatagatataaaggaaaatatgtctaaaatggagtcattagaagaaattcataaagaagaatatttgagattaaaagacaaattaaaaactctaacaacggatgatatttataataaaatagaaacagcaaaaatattaaatgcgattaatcaaaaaaaactgtatattttagacggatataaaaatttttatagctttttagctgattttaaaatcgctaaatctcaagcatataaatatataaaaatagtatcgggcgtagaaaaaggtattattgactataattttattgctaataatggcattgaaaaaacaattaaacaattggaaagtaacaatgttattaaaaaatctaggcaaaatccaataaagcctttaaggtttcaacttaaaaagcaagaaagttatgatttttataaaaaaaatgggaagtttactgggtttttattggaagaacttcttgaaagtcaaacagatttgattaataagcttttaaaaaaatataaacaattaaaaggatat

SEQ ID NO: 384 - DNA, 540 bp, Borrelia burgdorferi s.s.
ttggatattaaggttaataaaagagatttaagtgataatgaaaattatattattactgatagtgtattaaatcattataattctttaaaagaaaagttaaaaattaattctaaaaaggaaatctattgtaagttagaaactttaaaaattttaaaagaaattaaagacaatcattattataggtttgatggttataaaagttttgaagctttttctaaagattatagacttgcaagagcacaggtctataattacttaaaaattgctaatgcaatagaagatgggattatacaagaagaatttctaataaaaaatggtatactggaaacgttaattgtattaagaaataaagagagcaaaacaataaaaaaatcaaaacaaaacccgataaagcccttaagatttcagcttaaaagacaagaaagctatgatttttataaaagtaatgctaaatttacaggatttatgttagataaattatttagtgatggaaaagaaataattaaaaaacttatgaaagaatataaagaattaaaagga

SEQ ID NO: 385 - DNA, 486 bp, Borrelia burgdorferi s.s.
ttgtttacaagtagccaagtaagttttcaaattctttttcagattaatgacaaattcttctatgtgcttcatctaagtaattttgcagactcctttactaaatcgcttgtccagtttgtatattggtttttaggttttctcttcttcaaagatagccaaatgggtactgctgaggattctatacccttatatgctgcccaacttttgatttttgttagacttggagctggcaagttgttgttatatgcctgtcctgagtctagaaattcagaaagaggggagcctacctttacttttaaattaattcccaaagaagtttcttctaaatcaatatttgttacattcgacaatcgtccggggatatgtgattttaaggagtccgacttttgtcggattttaaaaccaacgaaactttttgcattatcaaatatagattttcttattttttctccaatttccatttgttatccttttggtcaaccaata

SEQ ID NO: 386 - DNA, 552 bp, Borrelia burgdorferi s.s.
atgaggattttggttggcgtttgtataatagcagcattggctttattgggttgttatttgcctgataatcaggaacaagctgttcaaactttttttgagaattcggaaagtagtgatatgggttccgatgagattgttactgaaggcatattttctagtttaaaattatatgcgtctgaacatcgtttattggttgagataaaaaagactttaattagtttaaaagatcctaattatcgtgatgtagtacgcccagtgagtgactataatgaggagtattttaataaattctttctagatttagggtctgagcaatctaaagacctgattaagttgtttattatggtaaaaaatgagcagaacaataataaatttatgcgtatagttcgttggctgtattcatgtatagaggagttatattctctagatattaagtattctggcgaggggagccatgagtataatcgtaatatgcctagacccactgcttatgaacaatatttaaaagtgaagaggtatgattataatagcccagtttctattttacctaca

SEQ ID NO: 387 - DNA, 543 bp, Borrelia burgdorferi s.s.
atgcaagaacaaataaatgaagaaactgttgcaatttctgaatctttgccaaaaaatgacaaagaacttgtaacaatatcttcagaagaatatgaacgattagtggctgatgcaaaaaaattgccagacatgatatcacgagaagatttcgaaaaacgacttgctgaggctgagagcaactttataaaagctcgaaaacaagccgaaaggcaagccgaagctaatgctttcaaagattctaaaattttgtcaaatcttgagaaagcttgtgagcagtatgaaattgctccaccttttgctaatgttctgagcgtaaaagacgctaagcttgcatttttggatgcaatgaaaaaaaagtacaacatcaagttcaaaattgacgaggaaggtgaccttgattcgcaaatcgacaatatcagcttgctagtacaagaacttacagcgtacaagcaaatggtaaatgcaagaaatcgatttacaggtcaaattattaacgagacaaaattacaaaaatacaaagatagatttgctttggggagggca

SEQ ID NO: 388 - protein, 656 aa, Borrelia burgdorferi s.s.
MNFNWFLMLFLFNFSVLLGSDTTALGHYQRANEYYLSKRYYDAIDELVEAIKINPNYYEAYKFIASIYYSLKIYTQAQFFIEKASKMSNEDTEYKILYANILLKNDKIDQAKKIYSEVLVKQRNNIDALVGLASIFEKNGLFIAAANYYLSILDYSQNNYSAFEHLIDIYQRLGMHDKIRHLINKVRVNFLSFPDFHKRVAEFYISINNLGLAEKYALNYLALIESSYKDFGVVDAYRLLALVYLHEFKYEDAIEALQKAILVNKDSDELYYLLGYSYLRFGDIEKAILNLERAKNLKKDLEFYNIALEESFFASNFRNFLKNNSNARISKHYENEGLKAFKSLNLNKALFNAKNAVDIWPDNDSARFLLSKIYKLMNLDIMAYEQLFYLAKQRNSTDSRILDFYDVVSFDVRKSLFYKYGYKSIADFNKLYDDRVVYKMAIFTQSENKFFGANDLILRYAERVLERNLNMEIVNYNFDYNKNRDYLINNFSEGFSYSRNNNLDLFLIFDFKADILKNTATLVVNIFSGKTGIKLVSFSYDVGGVNYLSNALNSLSKDFHDYLPKKGKILQIKNDDALINLGQVNGVVKGDVFLILKEGALNSDTRDSGFIVYKKSDILGEILIEDISDYISRGIVKSSTFLKDYVQEGATVLIKR

SEQ ID NO: 389 - protein, 238 aa, Borrelia burgdorferi s.s.
MNLMLITFNEFKTGISLNDTRAEHLVKILKLKDNDKFKFGILGEKNIYHCIYKKDKKLFFKKIFKVGESNKLKKLYVLIGMIRPIVAKRIIKELASIGTYKIIFFNTELTEKSYLNSKIFKNNDCEKHLIAGAMQGKITYLPKIKIIKNLKESLKYIQQENFEIKILLEKNSEKNLIDIEQINNAVIIVGPERGFTEKEKQLIAQYNFSPYSISTNTLRTETATIAASIITASKLINM

SEQ ID NO: 390 - protein, 312 aa, Borrelia burgdorferi s.s.
MKIFFVSSSSIALEVFKEIVKHYEVVGVLTLPDRPKGRGQKLSQNVIKSEAIARNIKVLDPLILDDNVLNLVRDLNPDLMLVFSYGKIFKKEFLDLFPKGCINVHPSLLPKYRGVSPIQSAILNGDCVSGVTIQSMALEMDSGNILVQKNFKIRSYDTSHDISKLVSSLSPSLVLEALEKISKGFLGIPQKSSEATFCSFLKKESGFIDFNLSAFEIKNKINACNPWPLVRVRLDYNDIIFHRADFLEVDLYKERKIGEIVDFNPEKGLFVNTGKGILLLLEVQRPGRKVLDFKSFYNGSRQLIGQVFSSIE

SEQ ID NO: 391 - protein, 348 aa, Borrelia burgdorferi s.s.
MPKTFGGSFDKNEIQAKIEKYEKEINQKNFWNDPKRAQKVIKAQSILKNKIDPWEELINKIKDLSDLCEIAENEKDTNGLEIEFNTLEKQYKDLLTISYFKEELDANNAFLTIHSGAGGTEACDWVAMLYRMYSRYAERKKYKTELIDLLEAEGGIKSVTIEIKGEYAYGLLKSEVGIHRLIRISPFDAAKKRHTSFASVFVDPVIDDKIEITIKPEDIRIDTYRASGAGGQHVNKTSSAVRITHIETGIVTQSQSDRSQHKNKDLAMKVLKSRLYEYYKSKEDEKNKSKQDTKKEISWGNQIRSYVFQPYNLVKDHRTKFENSNTTSVMDGNIDNFIEEYLKWKSLN

SEQ ID NO: 392 - protein, 342 aa, Borrelia burgdorferi s.s.
MKKKQLILLLFMPQIIYAKSYFASDVFFNKYQKLNEKPKTGFYIEYYSVDDTEKLYLYKENNLIKYKTIQIIENTKKITCYDTKDTKRKEEIYDNLNNKIQEIEYDSKGKTLETANYVYENENLISKNLKTINQKPKLIYYSKDDNGKLLKITGSNFQIWNYGINGDIKSTYFDIKKATTKVIKYDDKKRNSNSTIIVNNKIKSKEKNQYLDEEKIVNTFEEENTKIISTYKANNLIKEETYKNNELIKVNDFQYNESDMIIFQNTKEKDKDQYTNTKIEYEYNKDNQLKSKKIYENDIIYLKTEYHNDNEYEEEIYYNKKPALRVKHKNGKVTEEKPIGTN

SEQ ID NO: 393 - protein, 416 aa, Borrelia burgdorferi s.s.
MILRLPEITKIAYLIFKNSTNKIALIGSGISLSLVMIPLIIVYYMSSNIMTSTINKYIESEGFSMQIEYNETNRTHYLKDRLSLLKKKHNYKDLNYFFEKRTYGIIGNNKKQGVLIRAIENKFILENKSIKLIKGTKNLKKDSILISNQIKNKLNLNLNEKIDILIPNTKNDKIMPRIKKFNISGIIETGLKDIDNNLVLISFENENLMSKKFSKSIIGLKTNSNSIKNNEILKQNLETEFQEFQIKTFYELYSNKYNNLDISKKLLIFIMALIIIFASINISSSLSMLIFENKKKIAILKSIGMNNLNIKIIFLLISLTLSTIFCGIGIIIGNYLTLKISYLINFIDNILNFFLKIFGEENSEILNSEYYVSEFQIHLSLSFSLTLLGLYMLINILTTLIPLNIVSNLKEKEILR

SEQ ID NO: 394 - protein, 144 aa, Borrelia burgdorferi s.s.
MDIGLIGVNSALTISAIGSALGMGAAGSAAIGAWKRCYMQGKPAPFLLIVFVSAPLTQIIYGYILMNTLYEVMMQTNPWLLLGAGIGGGFAIAVSGFAQGKAAAGACDAFSETGKGFATYLLVLGLIESVALFVMVFLMIFKFV

SEQ ID NO: 395 - protein, 551 aa, Borrelia burgdorferi s.s.
MNEVLFVKTAGRNLKAEVIRIRGNEVDAQVFELTKGISVGDLVEFTDKLLTVELGPGLLTQVYDGLQNPLPELAIQCGFFLERGVYLRPLNKDKKWNFKKTSKVGDIVIAGDFLGFVIEGTVHHQIMIPFYKRDSYKIVEIVSDGDYSIDEQIAVIEDDSGMRHNITMSFHWPVKVPITNYKERLIPSEPMLTQTRIIDTFFPVAKGGTFCIPGPFGAGKTVLQQVTSRNADVDVVIIAACGERAGEVVETLKEFPELMDPKTGKSLMDRTCIICNTSSMPVAAREASVYTAITIGEYYRQMGLDILLLADSTSRWAQAMREMSGRLEEIPGEEAFPAYLESVIASFYERAGIVVLNNGDIGSVTVGGSVSPAGGNFEEPVTQATLKVVGAFHGLTRERSDARKFPAISPLESWSKYKGVIDQKKTEYARSFLVKGNEINQMMKVVGEEGISNDDFLIYLKSELLDSCYLQQNSFDSIDAAVSSERQNYMFDIVYNILKTNFEFSDKLQARDFINELRQNLLDMNLSSFKDHKFNKLEHALGELINFKKVI

SEQ ID NO: 396 - protein, 398 aa, Borrelia burgdorferi s.s.
VIKKVAIIDGLRTPNFKFGGSFKGLNIIDESSKVVKALLERNKLYKVDEVIIGNVISAGLGQNIARQIALKSDLGDTVPAFSVNKVCGSGLKALELAFNSIALGDNDIVLAGGVEDLTNSPYLLPRKIRFDGLKFGNFGIEDSIQKDALIDSLNFISMGLTAENLSEKYRITREMQDEFAYNSHVKALKARELGYFEDEIYPLTVFDKKTNSSVTISSDEEIRDNLTLNKLASLNPVFKESGTVTAGNSSSLNDGACFLILASEERVKSLGLSPLAYIGGFKSVGLDPLYMGFGAYMAIEGIISKLSLNPSEIDLIEVNEAFAAQALSIEKALFKKYNITSDIINVNGGAIALGHPFAVSGSRILLTLSRSMKMKNKTKGIASVCIGGGQGISSFLYR

SEQ ID NO: 397 - protein, 553 aa, Borrelia burgdorferi s.s.
VRMENQKDLQENYLKVLERVELGSRVSGTVVNIMKDYVLVDIGYKSEGFIKIEEFENVPQVGDRLEAIVVRIGGELGLILSVEKLNSLNFQDKVYEYIQNKKIIKGKVLVELPNGYKIQINENVSGFMPFYLSSKSKDEKLKRGSVVEFYILEASEADGLRLILDRRTLEKERDLAKRIELVSSYNEEDVVDGVVERITEYGAIVKIKNFVTGILHKRNIAFNQVENVEDFVRVGDKLKLKIIKINPQTGKMELSLKALKANPWDSVDVKYKIDSIVKGKVVKILPFGAVIELDSELSGFLHISNFSWIRVVKSPQELIKLGQIVEVKILEIDKENQKISLGIKQINENPWERLTEKYPIGRVVQGVVTNITKTGAFVNIEEGIDAYVSKFDISWLEEIDPEEYFKIGDLVNGKVLEVDKRKRNVRLGIKQLEESPWEDFSKSYKKGDTIEVEIVEKKSKGFQVRVYNKIMGFISKIQLGDTKESSLETFEKLNVGDKLKVVITSIDSKDKSVLLSYREYENQRSREEISSYLFKGNDEESYKPFENLLKRDE

SEQ ID NO: 398 - protein, 629 aa, Borrelia burgdorferi s.s.
MTKRMLNNTYRIKTILTIFLAITLLTIYKYFTLMAFNNSPDNTISLKSNDIAKRGTIYDRNGKPIAFSSKSYSIGTNPQKIENIVSTSETLGAILQINSRILKEKLSSNKGFLYIKRKIKREESDLIKRIQAEGRLSNITLYPDYTRIYPFRNTTSNITGFVGTDNLGLEGIEFSLNSILGKDKTKQQFLNEEPETNNIHLTIDMDIQQGVSKIAKKYFKENNPESLITLVMNSQNGEILSMVQFPQYDANFYSKYPEEIRKNLSSSLTYEPGSINKIFTVAIILESGKLNLEEKFLDNGIYQKQFPSGEKITIKTLNPPYKHIDSTEILIYSSNVGIAYITEKVSNEYFYKKLLDFGFGEKVGVPFPGETKGLLNHYSKWSGRSKATIGFGQEIGVSAVQILQAASILSNNGIMLKPRIIKKISNDKGENIKEFDKEEIRKVISKNSAQKVLKMMREVVNKGGIPNLKIKNLDISAKSGTSQAIDRKTGKYSEEDYTSSILAIYPTEQPKYIIYIVYRYPKKIIYGTRIAAPMAKEIIEFIEHQQNTIAYKKIKMPSKIKIPKAETNYKNKTYLPNFINLSKREAIDILKYYKNTMKIKINGDGFVYKQSISPNTKLEDITELELYLK

SEQ ID NO: 399 - protein, 336 aa, Borrelia burgdorferi s.s.
MIINHNTSAINASRNNGINAANLSKTQEKLSSGYRINRASDDAAGMGVSGKINAQIRGLSQASRNTSKAINFIQTTEGNLNEVEKVLVRMKELAVQSGNGTYSDADRGSIQIEIEQLTDEINRIADQAQYNQMHMLSNKSASQNVRTAEELGMQPAKINTPASLSGSQASWTLRVHVGANQDEAIAVNIYAANVANLFSGEGAQTAQAAPVQEGVQQEGAQQPAPATAPSQGGVNSPVNVTTTVDANTSLAKIENAIRMISDQRANLGAFQNRLESIKNSTEYAIENLKASYAQIKDATMTDEVVAATTNSILTQSAMAMIAQANQVPQYVLSLLR

SEQ ID NO: 400 - protein, 665 aa, Borrelia burgdorferi s.s.
LASGFFVPGLESKYNTKEIRESMLKSDKAKIDSSFKKLESLEQEKSAWQLINRKISTLNSLAKELTSLNSPFNLMSGNSSNSEVLTLSTRYGSKNETHKLIVDQIASADVFLSSNFDPKKVTIPEGDYIFLVGKKEINVKSNGNIDLLVKDINNKGKGFLSAKIVKSDKNGNSRFVLQSLKEGKENKLVIKGEGLSFAKQIGILSELKTNFNPNLSDIVVNQSSSNNKLAFENNGLVLNPLSEVSIEIPEDIEITSRSKIKFEVKYFDTGLEEPDSKIIFNPGGATFKDAKVESEDSVVDLGSDLKTPLEKKYIQMNMVKICSKEGSLELPLINISNNFEEVEVDVGALSNLEEINIENKANNKVIVISNVEIFDPKNRDGHLPINAKSFAENAKIKFDGVDVERDSNVINDLVPNVTLSLKKPSSDMVEAKIEPDYEGIKRVLLDFIGAYNEVLAEINIVSSNEDQPNNQKSNIVEELTYLSDSQKEEAYKNLGILRSEFLLKNLKSKLESIIFKPYVTSDPNFSIINQMGVFTNSISSSGGLSRYLRLDEKKFDESIRNNIDNVRELFLYDLNGDRVYDNGIAKMLGDCLSPLVASGGVIYNKIKNYDLKIFNQKNKVEDYKKKYEDRERKVEGELNTLDFTVKRMKDQENTLKAFDFNQRNK

SEQ ID NO: 401 - protein, 401 aa, Borrelia burgdorferi s.s.
MPNFCLFNSKSVLTGNDKIDNSAVLIKDNKIFDIVTSDRLKKMDLEEYQMIDTKGNYITPGLYDNHIHGFHGHGTDQCSTESILKMSEHLAQYGVVGFLPTLYPRPIDEMIKTIKACIAAIGKEKGAKILGLHLEGPFFSPEKKGAHPVSYLHEPSIEVMQKLIDAAGGVFTGSNGKRKTHISTMTVAPELKGMRELAIFCLENNINLQAGHTNATYENMIEGFQVGILHTTHFFNAMSKLDHRNPNAIGAVLIHGDVSCEIIADGHHIHPKLILMLRKLKDISKIVLVTDGLTPNCQTCGKLIANGDEVYIAEDGLFHSVKSNTIAGSTLTMIQGLKNLIEFGFSLSDAVQASSYNPTRILNIDKKGLICHGYDANLNVLDKDFNLKLTMIESKIIFNNL

SEQ ID NO: 402 - protein, 627 aa, Borrelia burgdorferi s.s.
VDSTFSGIEIGKRSLFAHKDAMNTVGHNLSNATKPGYSRQRVTMKTEIPLYAPQLNRAKKQGQLGQGIVVQSIDRVKDELLNTRIIEESHRLGYWTSQDKFISILEDVYNEPEDQSIRKRLNDFWESWHDLANQPQGLAERKIILERGKSFCEGIRNRFHSLERIYIMANDEIKITTDEANNYIRNIANLNKQISKSQAMKDNPNDLMDARDLMVEKLGNIISVSIENKQDPNEFLIHAEGRHLVQGSIANEFKLEATNGPTRTRWNILWANNDKAYLKTGKLGSLLNIRDEEIKNEINELNNIAANIIEIVNEIHEAGRGMDKKNGRSFFSQELKLTDDRGRYDTNGNGQFDSVHIFKINSTNEIFPEEKLGFYGTLKFEATNSNEIVEIPYNAPDTVQDVINRINNSNAQVTARINSEGKLEIKAVKEQEDENITFKIKHIEDSGSFLTKYTGILNASGPEGAYDYKNIDTTDKLAPKSTYSISPLKNPAAWIKVADIIDSDPSKIASGIKNPTNEISIGDNQAALRISSFGNSQIMIGKNLTLNDYFANTASNIAIKGQISEITKESQSQILKDLTDLRMSISGVNKDEELANMIEFQQAFIAASKFITVSVELIDTVINKMGV

SEQ ID NO: 403 - protein, 246 aa, Borrelia burgdorferi s.s.
MSGPKKLAIIALLVISIQGCKESSIIEKQFNYAIIFSDATEYFFEIQTTPFIKNEILFINDKNLEIIKDKLKTTKKILLTHKSNNEILNNEILKEKIFYLSKIKFSLKKSIDFLLNEKSIDLQKTLLFRDKSLNNEDLEYLEKKGKEKNVNITLINEKNISYIQTFITSQIKTIILFSLRDNNIILKKILNSPFSKNIKFVLIGNTRKDLKIIKLKYIITLKEPDLIKIAKDVEKDFQYEFNIYKQ

SEQ ID NO: 404 - protein, 356 aa, Borrelia burgdorferi s.s.
MLIFGGVSFEHEISCKSAYSIYLALLDLNKYNIYPVYIDKCTGVWYLLDSVSDPPKPINTDVLPIVSLLPGFGIFSNNKNLEIDVVFPVVHGRTGEDGAIQGVLKVMDIPCVGAGIIGSAISSNKYFCKLLLKSFDIPLVPFIGFRQHDYFLDKEEIKRNVKEVLGYPVIVKPAVLGSSIGINVAYSENQIESFIKEALKYDLTIVIEKFIEAREIECSIIGNEKMKIFSPGEVVVQDFIFYDYDAKYSVIPGNSIIFNIPAHLETNQLLSIKEYAFLTYKNLELRGMARVDFFVEKKSGTIYLNEINTIPGFTDISMFAKMCSNDGLQFKDLVDNLIDYAFQSYINRKKRIDFEN

SEQ ID NO: 405 - protein, 1119 aa, Borrelia burgdorferi s.s.
MNKKHTNFSVLLLLIFLLILSFGGFGYYIYQSKLNDKNREIMLNEVKNSVIDRNYKKAYSVAKLLQDKYPQNEDIAMLTNTLAEIANSSPFESKDLQRDSANQILDKIKGQDNTKTNVNENFDIAFNNRYIKDSTITENYSDRNDDVGIEDEDISEFKKSKIPEKIKPNTNPKEEDQIIQSPNPKLSVNDQKNLFNLEKLKKNLSGKSNSENILNDSQKIENDKQNTNLSKEKNSENILKTPDNSKYSNNNNTTSLKKISSNSQKESELSPPSQTIIGKIYRPYSYLIKKELYEILDDINTGRVTLGKNRLKELIKKGLSNKFQKVNELIENSKNKEASNLLLTLIKKDIEPNLINIPKDPYKKEIFQLDKEDKKPQYLEDLKSKVHSIKPIDLENTKSRQQAIKDLNEFLKNNPNDAQASKTLAQANKIQHLEDLKSKVHSIKPIDLENTKSRQQAIKDLNEFLKNNPNDAQASKTLAQANKIQHLEDLKSKVHSIKPIDLENTKSRQQAIKDLNEFLKNNPNDAQASKTLAQANKIQHLEDLKSKVHSIKPIDLENTKSRQQAIKDLNEFLKNNPNDAQASKTLAQANKIQHLEDLKSKVHSIKPIDLENTKSRQQAIKDLNEFLKNNPNDAQASKTLAQANKIQHLEDLKSKVHSIKPIDLENTKSRQQAIKDLNEFLKNNPNDAQASKTLAQANKIQHLEDLKSKVHSIKPIDLENTKSRQQAIKDLNEFLKNNPNDAQASKTLAQAYENNGDLLKAENAYEKIIKLTNTQEDHYKLGIIRFKLKKYEHSIESFDQTIKLDPKHKKALHNKGIALMMLNKNKKAIESFEKAIQIDKNYGTAYYQKGIAEEKNGDMQQAFASFKNAYNLDKNPNYALKAGIVSNNLGNFKQSEEYLNFFNANAKKPNEIAIYNLSIAKFENNKLEESLETINKAIDLNPEKSEYLYLKASINLKKENYQNAISLYSLVIEKNPENTSAYINLAKAYEKSGNKSQAISTLEKIINKNNKLALNNLGILYKKEKNYQKAIEIFEKAIINSDIEAKYNLATTLIEINDNTRAKDLLREYTKLKPNNPEALHALGIIEYNENNNDQTLRELIKKFPNYKKNENIKKIIGI

SEQ ID NO: 406 - protein, 280 aa, Borrelia burgdorferi s.s.
LMKKVIILIFMLSTSLLYNCKNQDNEKIVSIGGSTTVSPILDEMILRYNKINNNTKVTYDAQGSSVGINGLFNKIYKIAISSRDLTKEEIEQGAKETVFAYDALIFITSPEIKITNITEENLAKILNGEIQNWKQVGGPDAKINFINRDSSSGSYSSIKDLLLNKIFKTHEEAQFRQDGIVVKSNGEVIEKTSLTPHSIGYIGLGYAKNSIEKGLNILSVNSTYPTKETINSNKYTIKRNLIIVTNNKYEDKSVTQFIDFMTSSTGQDIVEEQGFLGIKT

SEQ ID NO: 407 - protein, 408 aa, Borrelia burgdorferi s.s.
MKVMQDPRLSKYKNAKNLSKKTVEEIDTLSLNKNFSDSEIQGSMLRSWISLIKGNKNKTPVEPKSNNINELKPGFIRKESKVTKIAKYFLAIGLEKSAKIMSELDDSDIILITREISKISYIAPEEKEHIIKEFEELLRNQKRYVKVDDNFAYELLNKTLGKSKAKSIYKKVTGNDIFIPFDYLSQIEHEQLWALIKDENIKTLVILYNYLNKDQKKYVFSMLEEEDRRKFVKDLVKPRQLSMETIEAISNKLKDRFKMQGNLKTDKLDGSKILVDILSYMDFNEEKNLLNNINMRDLNPVVDSEIREKIFDINVILRIMDNDLHNILREFTDKEIAIIIKDKADEVRDKMLSNVSKRRKEIILDEEAFLGKISKKDLKTMTTAFVNYIKNLTLKGDLIIYRKNEEFI

SEQ ID NO: 408 - protein, 668 aa, Borrelia burgdorferi s.s.
MLIFGFIGLFFLNIFSLHAQGIVTNKDAQEEFKWALNSYNNGIYDDALLSFKKILSFDPNNLDYHFWTGNVYYRLGYVEEALMEWRNLKDQGYKVPYLRHLISTIEQRRGIFSNYELNFKKLVKVASLDNSIYKRPHGYQITSLRADKYGGYYAANFVGNEILYFDVNNNVNALVKDGFSYLKSPYDVIEANNLLYVTLYSSDEIGVYDKVLGVKRKSIGNKGTKDGELLAPQYMAIDKRNYIYVSEWGNKRVSKFGLEGDFILHFGSRTSGYKGLLGPTGVTYLNENIYVADSLRNTIEVFDTSGNHLYSVFTSIEGIEGLSSDFVGNNVIVSSKDGVYKYSIAKKTITKILKADKMNSKISSSILDANNQMIVSDFNNAKVSVYKSDASLYDSLNVDVRRIIRLGGPKIYVELNVSSKSGLPVVGLKSENFSISNENYYIVNPKVAYNVNASKDINIAVVFDKSSYMKKYDTDQIVGLNALMELSKNKNFSFINATSVPIIDNIESLTNSIRNTSSLGPYSTDAVKTDVSLKLAGSGLMSKSSRRAVVYFSGGILNRKAFEKYSLDTIVSYYKNNDIRFYLILFGNDPINSKLQYLVNETGGAVIPFSSYEGVSKVYDLILEQKTGTYLLEYYYPGPQEPNKYFNLSVEANINQQTGRGEFAYFIN

SEQ ID NO: 409 - protein, 262 aa, Borrelia burgdorferi s.s.
VLMEVLMRRLFLLYILCSFVFLNLFAQGSSSYIDKQKELAIFYYEVGQRYINVGKIKKGKLFQAKALKIYPDLKKGFDIKLAVKELDARIKDDNPKVVMLEDIKLEEIPGIVHEKIEINDFTNAPKIEYIAQRERSKNQDKIIKFQFGKFARALISRNFDLFDSVIADKVNVMGQFESKNDFISTLSSASSKADADELEYLSVDDYYDLKSLKISKSNDTSFAVNVNAKKNDVTKNFPFWKERQTLIFTTEDDNNWFLSSIN

SEQ ID NO: 410 - protein, 442 aa, Borrelia burgdorferi s.s.
MMRSLYSGVSGLQNHQTRMDVVGNNIANVNTIGFKKGRVNFQDMISQSISGASRPTDARGGTNPKQVGLGMNVASIDTIHTQGAFQSTQKASDLGVSGNGFFILKEGKNLFYTRAGAFDVDSDRHLVNPANGMRIQGWMARDLEGEKVINTASDIEDLIIPIGDKEGAKSTKNVTFACNLDKRLPLIQEGANPADIARGTWVVNKSLYDSFGNVSVLELRVVKDLNTPNLWNATVLINGEQNSNFTLGFDNEGALASLNGQPGQKGDILQIPITFNVLGANVGEVGEQQTVNLKLGTVGSYTDSITQFADSSSTKAIIQDGYGMGYMENYEIDQNGVIVGIYSNGIRRDLGKIALASFMNPGGLAKSGDTNFVETSNSGQVRIGETGLAGLGDIRSGVLEMANVDLAEQFTDMIVTQRGFQANAKTITTSDQLLQELVRLKN

SEQ ID NO: 411 - protein, 455 aa, Borrelia burgdorferi s.s.
LCLRRLKMNKLEEHYIVPKDVVAELDKYIIGQDEAKKLVSIALVNRYIRSRLPKEIKDEVMPKNIIMIGSTGIGKTEIARRLSKLIKAPFIKVEATKYTEVGYVGRDVESMVRDLMSIAVNMVKEEMYSTVRDDALVRTEERIVDSLFKGSSNSENMDPNEIKAEEKVKEKLRKKLRAGELDDTTIEIQISSKMPFSTIEIFTGGNFEEIDMGIGGLLGNIFDRKKKRELKIKKAKEIILAEELEKLVDHENISDIAKSKVENMGIIFIDEIDKIAAKNRSGNDVSREGVQRDILPIIEGSKVNTKYGIVDTSHILFIAAGAFNLAKPSDLIPELQGRFPIKVELKSLSIDDLKKILKQTKNSLIKQYVAMFKVYDLDLKFSEEAIDRIAELTFNMNLESENLGARRLHGVMEIVLADLFFEVPGSKLKKFEINLDYVNKKIQINEQKDLNYYII

SEQ ID NO: 412 - protein, 228 aa, Borrelia burgdorferi s.s.
MRKITIMILFYGLIINVCPTTTTSILKLNKKANKHTIEKLYQKSMLLKDSKKYNKAIESLTKIINMDQNQADAHLLLSELEYLNKNWKKAIIKSQDYLKIIDFKDKKNFLDISWAYFLIGEVKNSMDYIIKFFQSGKELFRENIFIAIDALFKKSIYHFTNNENAAFNAILSSTFQLALNDDTLFIIFLNNLEIIKQIPFYHFNRKKLEELYLQISTLKTIQNTTCRT

SEQ ID NO: 413 - protein, 377 aa, Borrelia burgdorferi s.s.
MNIKNKLISLLIVVAISFIACKTPPESRESKNAKIAQPDNKNFQLRDIKDIKNELIRERGHLFYSKEFNEAERLEEAMKQSFSKKKAIEGNEIALKVLERYKTIIRETREKKEKTNYLKENIEKYLNDAEANEAYIWIPLEIDEVNNLYFEATRKYKNYDLDNALDMYSKAFNRAQQAAKNAKEAKALKETDERMYKQLKALEAASNLPIYSNNKLIKPSPWNGRAFIKERNSHLNLLNTNKDTYLLGEAEISIPIVLAYEEKVEIAKNSKPQEQFKTLELIERSRTLWEKGVEAKNVKNFRLANELFLESARYLEAYQSNASSELYVIKIGNTLWGISKKLYNDPYLWPKIWFANRQKIQNPDLIHSNWKIIIPAK

SEQ ID NO: 414 - protein, 528 aa, Borrelia burgdorferi s.s.
MKLQRSLFLIIFFLTFLCCNNKERKEGVSFKISLGAEPSSLDPQLAEDNVASKMIDTMFRGIVTGDPNTGGNKPGLAKGWDISSDGTVYTFNLREKITWSDGVAITAEGIRKSYLRILNKETGSKYVEMVKSVIKNGQKYFDGQVTDSELGIRAIDEKTLEITLESPKPYFIDMLVHQSFIPVPVHVTEKYGQNWTSPENMVTSGPFKLKERIPNEKYVFEKNNKYYDSNEVELEEITFYTTNDSSTAYKMYENEELDAIFGSIPPDLIKNLKLRSDYYSSAVNAIYFYAFNTHIKPLDNVKIRKALTLAIDRETLTYKVLDNGTTPTRRATPNFSSYSYAKSLELFNPEIAKTLLAEAGYPNGNGFPILKLKYNTNEANKKICEFIQNQWKKNLNIDVELENEEWTTYLNTKANGNYEIARAGWIGDYADPLTFLSIFTQGYTQFSSHNYSNPEYNELIKKSDLELDPIKRQDILRQAEEIIIEKDFPIAPIYIYGNSYLFRNDKWTGWNTNILERFDLSQLKLKNK

SEQ ID NO: 415 - protein, 541 aa, Borrelia burgdorferi s.s.
MSFNKTKKIGKKIKIVTLLMLAVSLIACNNNSEKEKLAFKVYIGGAPSSLDPHLVDETIGARILEQIFSGLLTLNTKTGKLKPGLAKNWEASKDKKTYQFYLRDNLFWSDGVEITAEGIRKSFLRILNKETGSTNVDMLKSIIKNGQEYFDGKVSDSELGIKAIDSKTLEITLTAPKPYFLELLLHYAFMPVPIHVIEKYKGNWTSPENMVTSGPFKLKKRLPNEKIIFEKNERYYNAKEVELDELVYITSDNDLTVYNMYKNNEIDAIFNSIPPDIVNEIKLQKDYYQHKSNAIYLYSFNTKIKPLDDARVREALTLAIDRETLTYKVLNDGTVPTREITPDLKNYNYGKKLALFDPEKSKKLLADAGYPNGKGFPMLTLKYNTNETHKKIAAFIQNQWKKILNINLMLTNENWPVLTNSRNTGNFEIIRVGRIGEYLDPHTYFTIFTRENSQLASYGYSNLEFDKLIRESDLEKDPIKRKQLLRKAESIIIEKDFPAAPIYIYSGHYLFRNDKWTGWNPNVSEVYYLSELKPIKNAKHN

SEQ ID NO: 416 - protein, 398 aa, Borrelia burgdorferi s.s.
MKENDFIKFGSYLRKVRDSKNLTLEMVAEDIKISIKYLKALEESNIEIFPNEVLAVGFLRTYSEYLDIDSRLISTLFKDYKSRLNNSYIGIKSEDKISNLGFLSDNKVSEKKIFFFSLESLSIFKVFLGIVGVLLLFVFLYFREVEGYFKKFFNLSQDEKIISNIHEVSFDKKNFWNVSLKEGDFLSLTYSDDIAKYRASFIGDDLVIVDESKKSKNILNLGEFKEINLDDNIRVKIIYENYYYDKLKIAHVSLESFALNVKYVSETNIDNRFNILNWQFDVKGTEKLPSSNYLTLYSSQKLSNVDLKIDFLNDTFFRYADENNLYGKSLFASKGIPINLAFEKSLILFFSRLSDVNIILNDRDITPFLKEQGKEIFAVQFFWVKTPSGFDLKVSEVY

SEQ ID NO: 417 - protein, 475 aa, Borrelia burgdorferi s.s.
LIKMSLNYTEINTLIKEIPFTNSLITKIIQPDYKSLVLEIYNKIDNKKFKILICLNPNTTRFHITKKNFKKNALKLRFSDFLKSKIQNGKIIKAFQMKNERIISLEILQKDMIILFIKLWPSSPNIIATNSNFKILDAYYRRPKIKETTGEIFLKAKEIHESNKMSDKKIMELKEEYNNTSYTSYSEFLENYYESLNDQIKKTNIKELLIEKYKKELIVLEKRIDSLKQQIKLLENIENEKEKGELILLNINKIQKGIKEINLLNYKEEKIKISLNQSLSPKENALQYFKAYKKGKNSFKTIQNQLKDNLDKFNLIQSKITMLKVENLIPEEEYNQEKTAIKEKEKTPKIGLHFTYCGFEILIGRNAKENDKLLRHCVKGNDYWLHTRDYPGAYVFIKNQKNKTPSLDVLLGAGNLCVFYTKLAKKSGKADLYYTQVKNLRRVKNKKLGLVIPKAEKNLHIKLDENLIKKIKNQT

SEQ ID NO: 418 - protein, 599 aa, Borrelia burgdorferi s.s.
MKREIYAFLSNFIIFMCFFLGLLFSYSYFFGENFLEKHKLIATFFDSILLFYKYFFGFFIFIVCIYFAFFVQQEIKIHLKSHNGYLFSRLYAFLLLFFIIGLFFTFIFNLILPYIIAQRNEYKFSYDRYNLLESEANEISLKIKHIDISLAANRFFLSSDLTDSMKQKRKHLENLIRIYDKMRIIYVNNEELLTNYYLVKSEYSKIPSYDVDLEKVKKTFSKYPLQSLKKQDFFNIVNEFISKNDYYTANYFAYIAYVATKDDNFVVLLNLTLKFINENRNFEKEKMQLISEEKQKNFLFLNTEKFKLAYYGFSNLYKLLPSDNEILNYKNKSLEKLRKRYLFFDEIEKYFEYYGINDVFLLQPDSKRGFYDYIYMQKVVAFNNHSKIIKNFELIRFNNTGNVILHIKIPFATLKGNSVYQNILDKDNEQSEITLTKVFVSTDSFDTNVLEVVKINENVENLALFSNFTEFGFFLKIQNLPSAFHRVAILNLKLINTFSLSLVLLISPISLVLIGAFFISLFSKIEFNFNSKAMIFLVSLMIAIFSGITCLFVNYFLIVFTSLLIYVFNSVYVSLAILSALLFFLIFKIITLNYKERLI

SEQ ID NO: 419 - protein, 475 aa, Borrelia burgdorferi s.s.
MKNKFLICVYFLLTLGISSLVIVESIFAFDESNNKLSRSNYEQMMIQAFEFVKENYVDPVSDEVIFEGALKGIFQSLGDPYSQYLTKKDLEEISKTTVGDYVGIGISIIKKMHSQDKQDKAKDFDPNSACVSIVTPFEGGPAYKAGIKSGDCITAVDGKSVYSMEVDQVVDLLKGKEGTKVKVSILRGKNLTLDFELTREKIEIQTIKYDVINSDIGYIRIVSFNPHTSVDFRKALDNLKNKNIKSLILDLRLNTGGYFQAAIKMADDILSKGIIVSTKSRNSSKPIDYKASSKQVLPSNIKIVALIDRSSASASEVFVGALKDNKRAYIIGEKSYGKGLIQHVVPFYTGGFKITSSKYYTPSGKSIHKVGIEPDLEIKSPDFSEEEALIYKEIFDKKLIEGFLKGKKFITEQEIDFFVENLVKENPKYKIDKEFLGKYVFFNYYQDNNKELPIYNLHYDKVLKTACEYLSKLGN

SEQ ID NO: 420 - protein, 458 aa, Borrelia burgdorferi s.s.
MKKQNPWIYLNEEEKNQILNFSESYKKFISKFKTEREVTAYALDKAKKLGFINAEEKKNLMPGDKIFYTCREKSVAFAIIGKNPIEDGMNFIVSHTDSPRLDAKPSPISEENELTFIKTNYYGGIKKYQWLSTPLSIRGVVFLKNGEKVEINIGDNENDPVFVIPDILPHLDRKIQRNKKSDEIVEGENLKILIGSLPIETKEKNKVKLATLQLIKEKYKIEEEDFVSSEIEIVPAGTAKDVGFDKALIGAYGQDDKICVFTSLESIFDLEETPNKTAICFLVDKEEIGSTGSTGLDSRYLEYFVSDMIFKIKKSEYNNLHVQKALWNSKSISADVCAAINPLFSSVHDEQNAPQLGYGIPIMKYTGHGGKSMASDADAELVSYIRQLLNKNNIAWQVATLGKVEEGGGGTVAKFLAGYGIRTIDMGPAVISMHSPMEITSKFDLYNAYLAYKAFYRE

SEQ ID NO: 421 - protein, 344 aa, Borrelia burgdorferi s.s.
VLYMRIVIFIFGILLTSCFSRNGIESSSKKIKISMLVDGVLDDKSFNSSANEALLRLKKDFPENIEEVFSCAISGVYSSYVSDLDNLKRNGSDLIWLVGYMLTDASLLVSSENPKISYGIIDPIYGDDVQIPENLIAVVFRVEQGAFLAGYIAAKKSFSGKIGFIGGMKGNIVDAFRYGYESGAKYANKDIEIISEYSNSFSDVDIGRTIASKMYSKGIDVIHFAAGLAGIGVIETAKNLGDGYYVIGADQDQSYLAPKNFITSVIKNIGDALYLITGEYIKNNNVWEGGKVVQMGLRDGVIGLPNANEFEYIKVLERKIINKEIIVPCNQEEYEIFIKQILKL

SEQ ID NO: 422 - protein, 784 aa, Borrelia burgdorferi s.s.
MLDIIKELGFRYATKFGCTISMSDIIVPDEKRTYVERANKEIAKIQNDYAKGVITGEERYNNVVSVWLKTNEELTNKMMEILKKDRDGFNVIYMMADSGARGSRNQIRQLAGMRGLMAKTSGDIIELPIISNFKEGLSVIEFFISTNGARKGLADTALKTADAGYLTRRLVDIAQDVVVRIEDCGTINGIKVETVKNGEEILESLKEKAVGSYSIERIKNPITGEIVLDANEEISEAKIELLEKIGIEKLVIRSVLTCEAEHGVCQKCYGRDFSKNKPVNIGEAVGIIAAQSIGQPGTQLTMRTFHIGGVAQAGSEDDKISLKNAFILNGIEGFNVRVDNGILFTRKGTLKIINVFYEEKIKNIKEIKVLDSQRVIKGIPLFIDKKGSEILSSYIGYVKLRDDNFFIVSEEQEVSLKAGTKLEIEVGDYVESGKVIGTFDPFAEPIIAEVKGKIKFKDIILGTTLKEEINTETGNVEKRITDNVFESLDPRIFIIDSSGMEVASYVLPGDAYLQVEDGQSINIGDIIAKLSKGSEKTQDITGGLPRVNDLFETRIPKNLTEMAKVSGIVQFKSIQKGKRLINILDEYGVEHKHYIPAGKHLLVRDGDVVKAGDMLCDGRINPHDVLEILGGISLQEFLLAEIQDVYRKQGVSINDKHIGVIIKQMMKKVKIVAVGDTNFVYGQKVDKHTFYEQNRKVIEQGGEPAIASPILIGVTKTSLNIDSFISAASFQETTKVLTDASIAGKIDDLRGLKENVVIGHLIPTGTGMGLYKKIKVSENIDSEV

SEQ ID NO: 423 - protein, 1155 aa, Borrelia burgdorferi s.s.
MIKRVHLGQGRADEILDLPNLIEIQLNSYEKFLQLDKLKSKKPLLNEGLESVFRNIFPIKSGNGDVALEYERYYIENDALNFTEKECKRKGQSYEAVLKVRLNLQFLTTGEIRQKDVYMGTIPLMTERGTFIINGAERVVVSQIHRSPGVVFYKEKDLYSARIIPYRGSWLEFEIDSKKDYLYVKIDRKKRILITLFLRALGFDTREKIIETFYNIKKIKVEDGTKRDLPGQYLAKSINIRENMYYRAGDKITLQDVEDFLQNGVNEIELVDFDGYNDISGKRFVSSNVILNCLEKEDAFFALKDGSKELPKESVMLAVYGSLFPGEPISIDNAENDLKTIFFSERRYDLGRVGRYKLSKKFGFDDLTTSVLTMDDIVNTISHLLRIYEGHDILDDIDHLGNRRVRSVGELLTNIYKGAMSRVEKIAKDRMSNKEVFNLKPQELISVKPIVSAVKEFFATSQLSQFMDQVNPLAELTHKRRLNALGPGGLSRDRAGFEVRDVHYTHYGRMCPIETPEGPNIGLIVSLATYSRVNDYGFLETPYRKVVNGVVTDQLEYLSAIDEEKKCIAQANAAFNSNGKYLEDLVSVRISGDYTTTSPTNIDYMDVSPRQLISVSSALIPFLEHNDANRALMGSNMQRQAVPLLFPKPPIVGTGMESVVAKDSGVVVKAKRSGEVILATSSKIVVKPFEAENAKDLDEYHIVKYERTNQDTCFNQSVLVKEGQKVERGEIIADGPATRYGELALGNNLLLGVIPWNGFNYEDAILISDRIVKEDLYTSIHIKEFSIEVRETKLGPEKVTGDIPNVSEKILNKLDENGIIRIGTYVKPGDILVGKVTPKSEGDITPEFRLLTSIFGEKAKDVKNNSLKVPHGTEGTVIDVQRITKEDVGNLSPGVEEILKVYVAKKRKLKEGDKMAGRHGNKGVVAKILPVEDMPYLADGTPLDICLNPLGVPSRMNIGQLMESQLGLAGKYLGESYNVPVFESATNEQIQEKLKTAGFNPTSKEILYDGYTGEPFENEVMVGVIYMLKLHHLVDDKMHARSTGPYSLVSQQPLGGKAQFGGQRLGEMEVWALEAYGAAHTLQELLTVKSDDMSGRVKIYENIVKGVPTNVSGIPESFNVLMQELRGLGLDLSIYDDAGNQVPLTEKEEELINKS

SEQ ID NO: 424 - protein, 342 aa, Borrelia burgdorferi s.s.
MLIKKICFCLLLLQAKIILSQDQQNLEFNNEYFYFNFQSAYYPPHELGTNGSGFSQSFKHPNFQNIDPSLKIPVNYWGGIKLISYLGYYKNFKALNNPNSIFFKNNGIDIDLNIGLSPVIVSFKSTVSFTPIAFLNLYASNELGIGWQAFGFKGVGVHIENGKYSNAVEFYSEITAGGRFQFDLNAIFQGEWTHIITVIGNDFTYLINPHAKKDQLWKYKADDGKNINGMLIKPYALLAYKMPIPLNTIGLLYEGKTQIGKERNISSWKNKGWGSDIFYHNISIVANFEIIKPLTLGLQFKLSTNPTYTSNTAGLADISKRIATGNSYFYYDSIGMSITYKY

SEQ ID NO: 425 - protein, 1494 aa, Borrelia burgdorferi s.s.
MKKANFLSTNFLILLLVCFVNVNLFSKDIFKFKLVDQFFPFYYKNNKGEYEGLIFSILDKWAKDNNADIMVEHIDNLNESEIEDEAIYLGLTYNVKLNDFFYFKSELARSISILFFKNSNKKYKNTHSTFLSNFNIGVIKNTIYEDILRLKNVNTIFLADNSQELVLALKNDKVDYIYGDCKTLHYIANNFLSEDLVIFTGDVFYSIKNRVAISRNAPEIVKNLNLDLFSYLMKMPEELVFSFLDSNAKGSFVDVGLYNDYPPLSFINSQGKLSGILVDLWNLLSRQHIFKPIFKGFSKEDIKKSLDGKSVGIFGGIISNDSVLENVNYVVSKPIYPLNFKFYSKDLSNDAGPINSQFIDFNFNNIQLNKNKDIVNNFIDIVNNSYGFIENSITTKYLLKLNGYNGRLKSYDSIFNKNRFLVLAIDNRIYKVIKYILNSIFDDISFESLLQIDKNWLDKEEINSSRINSYKIMNKVKFNIEEKIWLSKNNKLNLAVKNWYPIDYVEANNYKGINQFLLDKIRMFSGLRFNIIKVHSSLDLKKLIKSGKIDMLNTNATDSNLDNVFNIKLNSRIPLYIFSNKKRVLPSRSLEKFAILDFLYSKNLASNIKSKLILVSSFNEALLLLYKGKVDGIISDEYTAAAVFEELNIDDVEKIPTFRDLAFDLSLAIYNQDYILKEIIQKVVMRSNVDSQMYLNDWKFDIYYKSRSIRFKNFKFLVITFIIFYFTFLGFVIIFMFRLSFEQKRRYSFVMNEKKIAEAANAAKTIFIANVSHDIRTPINGIMAATELLDTTILTDVQKDYVRMINYSSDSLLSLIDDILYLSKIDVNELYVESQEIDLESEMEMVLKAFQSQCAKKNIDLFSYSKSIFNNYIKGDIVKIKQVLINLIGNAFKFTDDGVIVLNYEEVCRTRTDGNRVLVTVEFKVIDTGKGIEKENFSKIFEIFKQEDDSSSRVHEGAGLGLSISRELIRLMGGLGIAVDSKVGEGTTFSFMLPFLLGSELKSKKLSINRFQSVNGDNKVLNVLLSQKSIKIFEHCSILLGCSSNVRYVASFEDAYKVFKKYPSYNFVYINVNNDNIQEGIRLANNIERLNSDVQIIFLFYYLDNKALKNLKYGYVKKPLMGLGICSILYKKEFNPEMDFEDLVPIDSALRIKEPINVLIAEDNQVNQKVLKDILVVIGINENFIDVVDDGVKALKSLKDKKYTISFIDIRMPRYDGFSVAKEIRKFEKAKNLKPCVLVAVTAHALQEYKDKCLASGMNDYISKPIHISSIKTILKKYLQFEVDDIGENENLNQLVKFPNLDVNRALKELNLSYVSYSELCRGLVDFISINIIDLEKAFDEEDLSLIKDISHSISGALSNMRSELYKDFQKIETSKDSISELKKMYSFVKDDLFQLISDIKENILFESEIVSENKLYFKNNDQFLNLLNKLLIGIKTRKPREYKEILESINKYVLDDNIQVLFSDLRRNLRLYRFAESSKILEEIIEMLNNKRY

SEQ ID NO: 426 - protein, 260 aa, Borrelia burgdorferi s.s.
MDGVYKMIDIQLLDIDNDQPRKFVSPVELEELSISIKENGILQPIIVCKANERYKIIVGERRFRAAKLIQMTNIPVIEVNIKESCRDFMPLVENIQRENFTPVEEAYAYKNVMNKYSLTQKDLSEKIGKSRAYISNLVRILDLEQEILNAVHRKEISFGHAKVILSLKDKQDRYNLYLMIVKKKFSVRDAEKYVKNFYKSIVRKRELEQDPFLSNIKEFLFDKIQTKIDIKGNQDKGKIEIEYFTAGDLRRIVSFFGNIS

SEQ ID NO: 427 - protein, 639 aa, Borrelia burgdorferi s.s.
MNGRFMNYVASNIQVLKGLEAVRKRPGMYIGSVSINGLHHLVYEVVDNSIDEALAGFCDRIDVIINLDNTITVIDNGRGIPTDIHEEEGISALELVLTKLHSGGKFNKGTYKVSGGLHGVGISVVNALSSFLEVYVNRDGKIFRQTFSKGIPTSKVEVVGESSVTGTKVTFLADSEIFETLDYNFDVLEKRLKELAFLNDKIYISIEDKRIGKEKSSKFYFEGGIKSFVDYLTNDSKAFQSEPYYIDGFINDVIVNVGLKWTESYSDNILSFVNNINTREGGTHVMGFRSGLTKAMNEAFKNSKISKKDIPNLTGDDFKEGLTAVISVKVPEPQFEGQTKSKLGNSEIRKIVEVVVYEHLLEIINLNPLEIDTILGKAIKAARAREAARKARESERKKNAFESLALPGKLADCTSKNPLEREIYIVEGDSAGGSAKMGRNRFFQAILPLWGKMLNVEKTREDKVITNDKLIPIIASLGAGVGKTFDITKLRYHKIIIMADADVDGSHIRTLLLAFFFRYMRDLIENGYIYIAMPPLYKIKYDNRIYYFYEEKEKEKFLDSIETKNRNSISLQRYKGLGEMNPTQLWETTMDPARRKMRLMNIDDAIEAEKIFVTLMGDLVEPRKEFIEQNALNVINLDV

SEQ ID NO: 428 - protein, 506 aa, Borrelia burgdorferi s.s.
MINANMKTGHFEILAKNIEIISKCNELPFMIEDDNNASENSKLEYRYLDLRRDSLKNKIILRCQATHLIRNFLIKRKFLELETPTFVKSTPEGARDFVIPSRIHKGSFYALPQSPQLYKQLIMIAGFDKYFQIARCYRDEDSRGDRQPEFTQLDLEMSFVKKENIFKLIENMLFLIFKNCININLPKKFKKITYKKAMNKYGSDKPDTRFELELQDISRNLKNSEFNIFKDTLKNKGSIKILIVKDKADKFSRAKINNLEEIAKLYKTQGLYFTKIENNKFSGGIAKFLKTEEQELIKTYSLENNDIIFFTANNNWETACKAMGQIRIKIANDLGLIDENKFEFLWVYDFPLFEYDENTKTYSPAHHMFSLPKKQYIANLEKNPKKTIGEIYDLVLNGVELGSGSIRIHNKELQQRIFKIIGFQKEKSEDRFGFFLKALEYGAPNHGGIAIGIDRLIMLMTKSTSIKDVILFPKNSFAASPLDNSPSKISNEQLKELGINIVDGDN

SEQ ID NO: 429 - protein, 229 aa, Borrelia burgdorferi s.s.
MKTIEHELYYEFRIADDVKMIYTKKPFNLKLKELSNDNFNFVPRSKKIKYLKQLHTDIIYKVEDDFINFQEGDGLISSSLDVALVAYFADCLPIYFYDSVKKIIGLIHSGYKGSFNLIILKMLFMFEKMGSALKDLKIVFGPYNRSCCYEVSEIFLKEVSNKFSKDLLNASFVTRDGKIYFDNASFNLNLLSSFNLNIYNSKLCTYCLKNLYSYRRLRESQSYALIWRI

SEQ ID NO: 430 - protein, 442 aa, Borrelia burgdorferi s.s.
VRFNFIKFLYIGGWIMHSYIVEGGYKIGGQITASGNKNAALPCILAALLTDEEVILENIPNINDVKVVLDILNDIGADIAREGNTLKIKVLNIVKTEIDSSFTDLIRASILLLGPFVSRFGKIDMALPGGDVIGKRRLDTHFYGLCKLGAKLSTKDRRIVLKANKLVGAEMFLDEASVTATENIIMAAVLAEGNTVIMNAACEPHVQDLCNMLNSMGANILGIGSNVLEIKGVKKLSGTVFRIGADFMQVGSLISLAALTGGELEIKKADPQHFRLIRHVYSRLGINFEYDRENVYVRNKQELKVKLDFGGHIPKIDDGPWPAFPTDLMSIIVVTATQVEGTVLVFEKMFESRMFFVDKLIKMGARIVLCDPHRVVVTGKSSLKGNVLSSPDVRAGMSLLIAAFVAEGRSEIQNVYQIERGYEDVVNKLINLGAKIKKVKSQ

SEQ ID NO: 431 - protein, 209 aa, Borrelia burgdorferi s.s.
MERKVFSKDGKEIGTINLDDRVFNIEISHGSIYNAIKNELSNLRVGTSSTKTRSEVRGSSKKPWKQKGTGRARVGTKRNPVWIGGGIALGPKPRDYSYRLPKKVKKLAFKSVLSLRAADENSFKVIENFNVESGKTKDLALIIKNFASFNGKVVILLGNDDQMIKRAGKNIRDLKILSFDKLRVVDLFYAKNLIALESAVNKLNEFYIK

SEQ ID NO: 432 - protein, 2166 aa, Borrelia burgdorferi s.s.
MIDFATILVNLFLVSIVLFVYRQYDKRSRALDKIKKFVDLTKVNLEDFIEDKTKEINDLAVDMEAYQRSSIEIIKKIEEVQQKIKNKSNDFAEVEKKIAYHDSMLKDLDEMTFKVQENIQRLQVDGKIVDKLSKTLKGFNTQIDSVESNLNSVLEKFDKANKENLESIKIASWEKFDTNIKELVFKIDNLNKEISLYEKDLANIEERKNDILVKGNEKLDLEFSDFLEKVEFNIGKYSKEIESSFNFYENKYKLIENSIELIMESVKNKINEKEDFILNRLNEELQNKFKDILVYVDDRSKEIKDKLEDKLVLVDNEISSMSSSFKDNVYSRINSLEESMRIEMGKYEEQVDDVFDKFRSQVELNLKNIYEDYEDKISQVDNNIRERVELSLLDLNSKMESVQSGAIDFIKRLEDDSNGIYLEFKGKFGADIEVFSESFKGDINQLKMQLESQLLDVDSNIQEKLIKLNDNLISNFEEINGRFNNNYSNLNDNINAKYTALFESLDSSSSKFENQMESKYKSFTDKLTAGMDEFSLMYGEKFETLSQEATNNYQEFQDLNKKLENEIESFYNMFEKTQETLKVDFNTSLINIKDEIGKNIVEFRDRYYDEVNIFVTQLEESKLQYSKWQGEMDSNLKNIESQINKTNEEFLSLIQIQKDKGIELSESVFNDLSDHIQKKAIDMHGSWKDELIALNKSLLDIKVSSEELLSSATLKIESLEKDVNDRMEYVLLKTGDIESLVIEKYKELKDMSYSQSDEAILGIKEFINRQTEIIKDKSVFMLEDLNKKFDDKNNFVISKIEECDYKLKDFKIESEDILNNFKSDLNEFIESKLQIVSNIKSDNQKQIDDFLDRISKDILNRKDSINNEVDSKLSDWQSKLNEITVKIENLLSSGKVDLDLIDSEVTTKIKELKFSIESLESYYLEKIDEFRNQGAIYSDELLQDIMNHFNKETRELEENLSKKFAAVLNNSEEFVKEVDSLLQDKRTDIASFQANIDITLDSLNVKFNDINKEINGKYNEVISNYRGYSENISSKLENEIMHEIENLSRRLTDRIDSLSKGMDENLQKLKESFDVSKYQVEKFELKVKDLTDDGEAKINKLVKEIEQYYKSRLEEAIDYRRTIDNDIMQAKERFGEITNELKNNIESKSEFLNDLYKERFKLIESNFEERYSTFLIESEGAISKIRDEIYKTLTSNDENLQIKISEMDQNFEIIEQRSKDILEFEKELQDKIKDCYGFINSQFGEIKAGVEENIKNHFDVCIKKVNTLIDDDIVKYENEIHKRIDSLKSIESTFDSIEKNLNDKVSGCIDKIANDFNLKYIELEERCNEGQLNLENKIDNKIKAIDNLALSQYDGLEKKYADMYDEFSERLNSYIATLSEEFKSSNKEMIFELESQLKNLKNLESDLNNVEKDVIRLKEESYHNVSSHLKLLEEDFFKDLKIRGEELKYSLENFIASYNDKIQNLEYDLSKNLENKTELIQSFRLDIEQKMKDDKENFYLDFTKEFSSKKKDMQSEIALMETNITGKVDEFVDFVNNKQSIIDSWFLNIKDDVKDWQEKSYSTIEKRINLAELGIKSFENDIFNVKIGLESFKDGFEIKAEEIFSNLQNEAKKIEQSVHLDFKNIGESLNLKVLDLEKFVDFKLEKIDEKVNKKTEDILIQAEVKFLTQQKDLEDKIFELNQKLEHEFTTLSSNLDKVRREMVDVISSDKESFEGQIELINKNISEFSEKISLYRNNIETSIENEYNSFSKSIKSDLGLLEDELKKSLKHSTSEIETIKSGLQEQIDKFEVEFKKNHKELLKEVDNNILELESKILNCDVQFNKFISEIKDNLVEYKSDLRAEFEDSYDKINFQIENQIENFKKLDSELEKNNSIFLEAYSLKDKLEKLWETLKNEIGLAQEYKNNFENVNKEFYNIQKETLGIIEIFNELKLEQESIKSIKNDFNRFFEFYSSFDSRYKSLIESYDEMQIYKAKIKEIADEQRTILDNYERISNKESILKSTIESVDKNFDLINEVEKRFNNLSKESAKIQDNLKDMENVVSSLLLNKGLSEEVLINAQNLKEMLLDIENKLKNTLTMRERVVKSETRLENLNIAAEERIKTLGILVKTDSKYQDNVGLNNETVRNSVIKLMRQGWSAEEISRATKLSIGEVELILELGISNKGD

SEQ ID NO: 433 - protein, 635 aa, Borrelia burgdorferi s.s.
MGKIIGIDLGTTNSCVAIMEHGKPVVIQNSEGGRTTPSIVAYTNKGERLVGQVAKNQMVTNPENTIYSIKRFMGRRFEEVASEIKMVPYKIEKGLNGDARVNISNIKKQMSPPEISAATLTKMKETAEAYLGEKVTEAVITVPAYFNDAQRQATKDAGKIAGLEVKRIVNEPTAAALAYGIEKKHEEIVAVYDLGGGTFDISILELGDGVFEVKSTNGDTHLGGDNFDDEIIKHLISEFKKESAIDLSNDKMALQRLKEAAEKAKIELSGAQEASINLPFITADANGPKHLQYTLTRAKFEQMVDHLVQKTKEPCLKAIKDAGLKASDINEVILVGGSTRIPAIQKIVKDIFGQDPNKGVNPDEAVAIGAAIQGGILTGETKDMVLLDVTPLSLGIETLGGVMTKLIERNTTIPTKKSQVFSTAADNQTSVDIKVLQGEREMAAQNRILGNFILDGIPAAPRGVPQIEVSFDIDANGIVHVSAKDMGTGKEQKIRIESSSGLSESEIDRMVKDAEAHAEEDKKLKENIEAKNTANSLIYQTEKSLKEYSEKISSEDKEAIESKIKELKESLEKEDISLIKSRTEELQKASYKIAEMMYKDSSQQNANSQQENGPQSNTSEEGKEADYEVVDEDKK

SEQ ID NO: 434 - protein, 187 aa, Borrelia burgdorferi s.s.
MEKKETKSESEKTNKQDNKNTKSQKKENLNLVNSDKKIAELENEISNLKDLYLRKQAEFENFRKRLEKEKDNFVKFANETIMKDVVNFLDNLERAINSSKKSKDFDNLLTGISMIENEILSIFDKKYNLKKFGENGENFDPSRHEAISIEEKEGLKNPEIVEVYQKGYCYNDRILRTAKVKVAQSKN

SEQ ID NO: 435 - protein, 286 aa, Borrelia burgdorferi s.s.
MKDLNENNDNNKGFFVALTSIATVCIIIFLGTIIFFPNKNLASDIAEKNIVLEEDKDPNTLEKVDQNEKSLKVSETQNEIIIDLTQDLNKEKKPTNKIPNTQKSKIIEKPQPTTQKISNTSQKSKTIEKPQPTTQKISNTSQKSKTIEKPQPTTQKISNTSQKSKTIEKPQPTTQKISNTSQKSKTIEKPQPIAQKTLNTDNIYDPNIEYYIQFVSLSDPINADNYIQKLLKYNIIARIYSATVDNKDIYRVRSGPYKTKSEAKADFKKIAGIGEFKETYILPVNK

SEQ ID NO: 436 - protein, 497 aa, Borrelia burgdorferi s.s.
  misc_feature (198)..(198): Xaa can be any naturally occurring amino acid
MNKTKNRSLTYFIILSCISLFGANNNTISYSSIEIPLEDLSEEFKSSGNKSDQINTSKHLNKNIVSYEDPKKGKDLKLPENIRDKKLPQKRMDENDLKSVIENYENKIKNIEKLLKTKNQKTSENENKKIESIEKKAKKYEILTNKLKNEIVEIKKLLNKKIKPKEDENYEKINIENIEEETDDDFEDNYEYNDEIEXTNEDNYPSNEGIINNLKENLNENEKYYAINEKKIDELEDRINENENTILDLQRELRNFKKKDNSDKNLEEIEENLSSIGRIINDLKRKISANEAINKENQKKIRTDKHKLKELEDKIKENEETILKLQKELNNFKKKEIYQKPLNEETFTPSITSKNDDLEENKKLKKEYLKPIEKKESRDLEENTKSTPKTTMIKTADFQIYPDIYLNNYKFKEKGDQFAFKKENTYYIEIDPTNNLNEALKNHEIISKYKFEKYFINPILKNKEEFFRNLIEVKNIHELGIMYKNLKPEFKQIKIIK

SEQ ID NO: 437 - protein, 650 aa, Borrelia burgdorferi s.s.
LILIFYFKQIALFIIFRLCYIIKKVKIKLKRKSCMKKQFDTEVNDLLYLIIHSLYSHKEIFLRELISNASDAIDKLKFLSLTNEKFKNIALEPKIEISFDDKSILIKDNGIGMDEQDLTNHLGVIAKSGTKEFINNLKQDEKKSASLIGQFGVGFYSAFIVSEKVEVTSKKALESDAYIWSSDGKTGYEIEKAKKEESGTEIKLYLNKEGLEYANKWKIQEIIKKYSNHINYPIYIKYSEPIMKDGKQEGIEEKEEKLNETTALWTKNKSEIKAEEYNEFYKNTTFDYENPLMHIHTKAEGNLEYTNLFYVPSKAPYDLYYPNTKPGVKLFINRIFITDSEGSLLPNYLRFIKGIIDCQDLPLNVSREILQQNKILSKIKSSSVKKILSELEKLSKKNPEKFSEFSKEFGRCIKEGVYSDFENREKLISLIRFKSSSVDGFVSFKEYKERMNESQKSIYYITGGKENILKENPIVAAYKEKGFEILIMDDELDEAILNLIPEYEGLKLKAINKNETSNELKDENFKKIEEEFKDTLTKVKEILKDHIKEVNLSATLIKEPSAIIIDSNDPTYQMQKIMLSMGQEVKEIKPILELNPNNKIVQNLKNLEPEKLEKISILLFEEAMLTSGMPSKNPGKFINIINEFIEKDFL

SEQ ID NO: 438 - protein, 229 aa, Borrelia burgdorferi s.s.
MLEIISLGGGVINSNQINIEFIKNFKNFVFKWLLENEKRKIILIVGGGRVAREYQDAYKKINPDFKVHELDEIGIISTRLNAEFLSKVMNPFCKDKIVTNPLKNFSFKGKILIASGWKSGFSTDYIAVKFAEKFNKKDIINITNVNQVYDKDPKKFKNATAFKKLNWKQLQNIVGQKWNPGLNLPFDPIATKLSSKLGLTLYIVNGNNIENLEKVFNKNNDFFGTIIVK

SEQ ID NO: 439 - protein, 1161 aa, Borrelia burgdorferi s.s.
LLKIKFYFDKIILGMSFRSRFIHLHVHSDYSLLDGAAKISDIISKAKKCNMSHIALTDHGNLFGAIKFYKEAKKAGIKPIIGIEAYMAKTSKFLKKQDDLGKMSYHLILLAKNELGYKNLLKLTSISYLEGFYYRPRIDKDDLEKYSEGLICTSACIGGLIPRLILANRFEDAKNEILWFKKVFGNDFYLELQRHGIKDQDIVNERLVKYSRELGVPLTAANDSHYVNREDATAQDIIVCIGTGAKKSDENRLKMETNEFYIKSQEEMCELFNDLPEALENTVRIAEKCDDFKITFPGPILPDYQIPVEFNTLGEYLEHLTLEGLKFRYKNLTSKIKDRAFYELSVIIGMGFEGYFLIVWDFIKFAHDNDIPVGAGRGSGAGSIVAYALRITDIDPLKYNLLFERFLNPERISMPDFDIDFCFEGRDEIIKYVTNKYGEDKVAQIITFGTLKPKAVVKDVARVLDIPFAESNELTKFIPDGPKVSLKEVLDDNSLKECFTSKPVYKELMNAALVLEGMNRHASTHAAGIVISKTPLTDYVPLYKDYKQGSVSTQYTMDLLEECGLVKMDFLGLKTLTLIKNAENLIRSVNPDFKIKNIPDNDVKTFNMLGEGRSASVFQFESEGMQQILKDAKPDSIEDLIALNALYRPGPMQFIPQFIAAKKGVKRIKYPHPDLKEVLRPTYGVIVYQEQVMEVAKIIGGFSLGKADILRRAMGKKKEDEMNEMKVDFLRGAIEKGYDKEIASEIFELLKPFSGYGFNKSHAAAYSLIAYQTAYLKANYPEYFMAANLTNEINNNDKLSYYIEESKAIGINVLKPDINRSFREFRVTDSGISYGLNGIKNLGGIVVDLIIDEREKNGKYSSFEDFIRRVDDKVINKKFLESAIKSGLFDSLDQNRKTLFENLDHLIEVVSEDKNNKKLGQNSLFGALESQDPIQQSFNYQTFKEYSYSELLGFEKELLGFYVSGHPLDPYKKAIDSFSSLNVLTDLAAKKDSIVQFSGILNSVKVIQTKRNNAKMAFGVIEDFKGAIDIVVFTESYERYRNFLLEGNVIGVVGRLTFNRDKFSIVVEKVVNIERLSEYKINNIHIKFLNNKLNDLQLLNSLKESISNFEDNSGFSNVYFYLRENGKDLKLKMNSILNFVPDEDKLDKLRKCVIVEDVWVD

SEQ ID NO: 440 - protein, 265 aa, Borrelia burgdorferi s.s.
MNNCLIKFFIFLLVFSNSYVAFSKNVNVLIVTAMDSEFDQINKLMSNKEEIVLKEYGLNKKILKGKLSNRNVMVIICGVGKVNAGVWTSYILSKYNISHVINSGVAGGVVSAKYKDIKVGDVVVSSEVAYHDVDLTKFGYKVGQLTGGLPQKFNANKNLIKNAIEAIKSKVGGSNAYSGLIVSGDQFIDPTYINKIIGNFKDVIAVEMEGAAIGHVSHMFNIPFIVIRSISDIVNKEGNEVEYSKFSKIAAFNSAKVVQEILRKL

SEQ ID NO: 441 - protein, 618 aa, Borrelia burgdorferi s.s.
MKSHILYKLIIFLTTSAAIFAADALKEKDIFKINPWMPTFGFENTSEFRLDMDELVPGFENKSKITIKLKPFEANPELGKDDPFSAYIKVEDLALKAEGKKGDQFKIDVGDITAQINMYDFFIKISTMTDFDFNKESLFSFAPMTGFKSTYYGFPSNDRAVRGTILARGTSKNIGTIQLGYKLPKLDLTFAIGGTGTGNRNQENDKDTPYNKTYQGILYGIQATWKPIKNLLDQNEDTKSVIAETPFELNFGLSGAYGNETFNNSSITYSLKDKSVVGNDLLSPTLSNSAILASFGAKYKLGLTKINDKNTYLILQMGTDFGIDPFASDFSIFGHISKAANFKKETPSDPNKKAEIFDPNGNALNFSKNTELGIAFSTGASIGFAWNKDTGEKESWAIKGSDSYSTRLFGEQDKKSGVALGISYGQNLYRSKDTEKRLKTISENAFQSLNVEISSYEDNKKGIINGLGWITSIGLYDILRQKSVENYPTTISSTTENNQTEQSSTSTKTTTPNLTFEDAMKLGLALYLDYAIPIASISTEAYVVPYIGAYILGPSNKLSSDATKIYLKTGLSLEKLIRFTTISLGWDSNNIIELANKNTNNAAIGSAFLQFKIAYSGS

SEQ ID NO: 442 - protein, 476 aa, Borrelia burgdorferi s.s.
MSIVIDSFKEISKIPRCSKNIKGIINFIKQRAKKFGYSFKEDRVGNIVVQIKSNNNIDMHPIILQSHVDMVCEKNESSLHNFETDPIEIVEEDGYLKAVGTTLGADNGIGVAMMLGIMSEANNFPHPDLELLFTVDEEIGLIGALGLDSNLCSGKSLINLDGEEEGYFLVGCAGSRLVEIVFSPKYSLVTKKTKVEILFKGLKGGHSGADIHLDLANSLKLMFFALFEIKANLNFEIEGIFGGNSSNAIPIEAKALIFIDDNDYDLLNKELKLFVLKVKSAYSLEDEFDIIVNKREFSSVKVLDENSKNKLLNMGMGFLHGVQKVENYENKLIKTSLNFSSLLRMQDDYIFTFLIRSLLDLDKEYVCNHLQSISDLSGANLRVIYDDPSWQPDKNSNLLKHLQEVYKEMYLEDANVSTIHAGLETGIISSRLGGIESVTLGPWIEWPHTTRERVNISSTIRVYDFLKKSLERFQKF

SEQ ID NO: 443 - protein, 430 aa, Borrelia burgdorferi s.s.
MARVKGQKVKECSFCGLSVAELGGNVVISNGVAICPECSKICHNLFKEKLCKPLDSKSNGLPTPKQLKDHLDMYVVGQEDAKKVLSVAVYNHYKRILKNNKYDNGIEIEKSNILLVGPTGSGKTLLAKTLAAEMNVPFAIADATTLTEAGYVGEDVENILLKLIHAAHGDVSLAEKGIIYIDEIDKIAKKNENVSITRDVSGEGVQQALLKIIEGTVANVPPRGGRKHPYEDTIEINTQNILFICGGAFVGLENIVKNRINKSSIGFSAIEKKNIREDTSLKYLEMEDLIKFGLIPEFVGRLPVHSYLEKLNKEDLLRILVDPQNSIVKQYYHMFKMDNVELVFEKDALESIVDEAILKNTGARGLRSILEGLLKDVMFEVPSISKAKKVVVTKESVLNADVNPLILVGNAIKKPWAKELYEINLKYDKK

SEQ ID NO: 444 - protein, 813 aa, Borrelia burgdorferi s.s.
MQLKNLGQKSYMKSILNMIKNRKEDLPIVILKENVLFPNITLWVTFDNEYVINSIAQSMLEERLILFAYSNEPNCDESDRGVVKNLCSVGTYSKLIQVIKISKDVIKVLVECQSRVLIDSVSKKNDYLRAKVTFVPDSSGLNRELFTYSKFLKETYEAYRNSLSLKSYDADNEPINYFENPSKLVDIIASNSNLENSIKLELLQELNVKTRIEKLIVNLSIEIDLLDLKKDINSKVRAKLDKGQRDYFLSEQVKEIQKRLGKDENDYIDRLNSKDIPEDVKSKIEKEISRLSKMQMNSPDANIIRSYIELILDLPWNENTVMKNHLSEIEFILRNSHYGMDEAKEKIINFLAVYQINSKVKAPILCLVGPPGIGKTSLVESIARSLSREFVKISLGGLRDEAEIRGHRRTYVGSLPGVFISAMKRSGKSNPVILLDEIDKINSSYKGNPESALLEVLDPEQNYKFIDHYLEIPYDLSNVLFVTTANSLNGMSKPLLDRMEIIKVEGYSYIEKLEIAKIFLIPSIIKESFLDKVYIRIEDDVIFNLIRNYTMESGVRGLKRVLTNLIRRLVRELLYEYSKDQIIKGNFYSPSSLIHGNNSLFTHDPDIPGIYKIININNYYNYVDTEDNLDLIKIDSSGFVYGLAWTNYGGTVLPVEATKFEKKGDIILTGSLGAIMKESAQLAYSIVKTYSSKLNFDVKESPEIHLHFPEGATPKDGPSAGITIATAIASILSDKKVPLDLAMTGEVTLKGFVLPVGGIKEKVLAAYRNGISKVILPKDNKKDYSKLPEEVKDNIDVKFVSSLEEVFDYLNII

SEQ ID NO: 445 - protein, 697 aa, Borrelia burgdorferi s.s.
MITLFKILALRKSKTFCILQIIDLIILFYFLIIGPVNLNADFEYKVVKGDTLFSIAIKYKVKVSDLKRINKLNVDNIKAGQILIIPSDSNLGQNITHKVNHSFSLLESSKGGVFYTAKEGDTIESISKLVGLSQEEIIAWNDLRSKDLKVGMKLVLTEPDFLKPYMVRKGDSLSKLSQDFDISSKDILKFNFLNDDKLKIGQQLFLKKATKNVNFHYVKRGETLGRIAYIYGVTAKDLVALNGNRAINLKAGSLLNVLKIVNNDLEKPVERDLKIEKKIDNKFIYHSVAVGETLYSIARHYGVLIEDLKNWNNLSSNNIMHDQKLKIFDKKLSIDSSIIKTKNDLYIKKKVDSGSNSSNKVQTIVNLPSSKNKKLNLNTFGITANQDLFDISSLVILDSKIPIFEVVGDFYYWYRPRKISQPSEFYSEDWHSPLNSYKKATQLFKSFEKLVNSRFNKGSRLKDKLIILDPGHGGLDPGAIVKSRDGLGNEVFVVEDEYVYDIALRLYVYLKEEGANVEFTILAPDHLIRNSVFANNTFVNVKNEVYNDYDLNKNDTVDSWISGTPSGLKKRLVVVKNIVNKYKHIKDKDIAFFSLHADNSVGAPKSMGFYYQKDDDKKYDIHSKSAAEKITEGMKRSFYIKGQNLHVLRNNIVMTKLLVEVRNLAFPEEAWAIRSSKLRDQDSKILANGILKILENN

SEQ ID NO: 446 - protein, 562 aa, Borrelia burgdorferi s.s.
MFRKLKKLKTYIIIISITKFSEDNLLLIISNIKYLIEHKQLAYKIHWTFPIYFFEILREHEELNKWLFERFKTNTDIYMPGTYSGSPHEYMLHDEIHLDLYWALKNPFKSGYKDIFQNTPIMFYIYNIEKFRKKVTELYRKLNFNYTEGIRQSKNNKNYLIFYKNNCQYLYEVQKIDSPKSNVETLIYFYEIKETYDNQELKNFLLYLKALENNLHSIKIQNLEGSKLTTELLEIPKFNSLKEQEPIINFQNKRLKDYQINEKSLREFLINKHQDEIIKNSESIVPKNLEYNMEGNFTLSHDQYNIKFENGKLNKIKFKDKKVEFLNTSRTYFKVSSKKELIKEASIESSFSFSNEKILGIKQYLAFNSAKKSTIDFFIDETISSFFISIKIKWPSKIDLDKKTLKKCNPDYLLEYSALEIPVFEITKGTNLKITAKYSDLDTYEKIIITKNNPKGYINGTEFLISKGNDKNSNFFISFLNVEKHIIHTINYKIEKINSKKWLILNIGGSYNTVKIQDVINYSQTLNLMILPLNNNFDNKIKLNSKIKNLIFYTNIKKYENK

SEQ ID NO: 447 - protein, 545 aa, Borrelia burgdorferi s.s.
MAKDIYFNEDARKSLLSGVEKLSNAVKVTLGPKGRNVLIDKKFGSPTVTKDGVSVAREIELENPFENMGAQLLKEVAIKTNDVAGDGTTTATVLAYAIAREGLKNVSSGINPIGIKKGIDHAVNLAAEKIRQSAKKITTKEEIAQVASISANNDSYIGEKIAEAMDKVGKDGVITVEESKTFDTTISYVEGMQFDRGYLSPYFSTNKENMSVNFDDAFILIYEKKISSIKELLPVLEKVLGTNKPLLIIAEDIEGDALAALVLNSVRGALKVCAIKSPGFGDRRKAMLEDIAVLTGGVLISEELGLTLETVEIEQLGQAKTIKVDKDNTTIINTGNKEQIKERSELIKKQIEDSTSEYDKEKLQERLAKLVGGVAVINVGAVTEVELKEKKHRVEDALSATRAAVEEGVVPGGGSTLIEVAMYLDTIDTSKLSYEEKQGFEIVKRSLEEPMRQIISNAGFEGSIYIHQIKTEKKGLGFDASSFKWVNMIESGIIDPAKVTRSALQNAASIAGLLLTTECAITDIKEEKNTSGGGGYPMDPGMGMM

SEQ ID NO: 448 - protein, 253 aa, Borrelia burgdorferi s.s.
MLGDFMYKLVLVRHGESEWNKENLFTGWTDVKLSDKGIDEAVEAGLLLKQEGYSFDIAFSSLLSRANDTLNIILRELGQSYISVKKTWRLNERHYGALQGLNKSETAAKYGEDKVLIWRRSYDVPPMSLDESDDRHPIKDPRYKHIPKRELPSTECLKDTVARVIPYWTDEIAKEVLEGKKVIVAAHGNSLRALVKYFDNLSEEDVLKLNIPTGIPLVYELDKDLNPIKHYYLGDESKIKKAMESVASQGKLK

SEQ ID NO: 449 - protein, 341 aa, Borrelia burgdorferi s.s.
MKRKAKSILFFLLSTVLFAQETDGLAEGSKRAEPGELVLDFAELARDPSSTRLDLTNYVDYVYSGASGIVKPEDMVVDLGINNWSVLLTPSARLQAYVKNSVVAPAVVKSESKRYAGDTILGVRVLFPSYSQSSAMIMPPFKIPFYSGESGNQFLGKGLIDNIKTMKEIKVSVYSLGYEIDLEVLFEDMNGMEYAYSMGTLKFKGWADLIWSNPNYIPNISSRIIKDDVPNYPLASSKMRFKAFRVSKSHSSKEQNFIFYVKDLRVLYDKLSVSIDSDIDSESVFKVYETSGTESLRKLKAHETFKRVLKLREKISMPEGSFQNFVEKIESEKPEESSPKN

SEQ ID NO: 450 - protein, 466 aa, Borrelia burgdorferi s.s.
VQIKEIYFGPKILDDKNSNSKLTNFDFKVVSFELGSDHYLVDIMQVKEIRKSSNFTYVPNAKKYVAGLDNLRGEIIPIIDLRIMFNLEFNKKDIEDIMVLKNEDLLIGVIVDKINNVFSIDSSLIQDPHPVLSQDSLINYIKGVVDYNEKLYILLNVFKIFNYGEEEKLLKPGQNFVEKSDFVSDCDNLDILENSKNDFSNKVSSKNDGNNENSTLNNTAAFNLENIKKNLLKYSFNASLVNDVFLEKVGVKFNMVDTDYLPCDSFLNEFYSKSSGNLWGADCLEEFKNEIVESRLSFMNNLNSIFNVLEIGCGSGKETMALANALSEYYVKPFKLTAIDNDLSKVVETSRLVFSESEIGISEIYSRNSFEQSPGVYKFKSEILSNVLFEYSDALFSDLPDNLGMVFLKDVLCFLDSKDQILILNIIASKAIKGALLVLGDNEELKNNDVFIKEKSTKYFNLYRKV

SEQ ID NO: 451 - protein, 753 aa, Borrelia burgdorferi s.s.
MLLKLKYRFVGFLLLFLIFILLLFSTIFNFVLCGYLEDYYKQLTRAQVRRAAFSLQSFLDTLHVIINGAASNLALETISEFAMSENRGKDFSESELIDLRKNPKFVIDSVKVSKKYRQYLYNFMANLKNDTLFEEFAFFDFEGRVIVSTRHENNMDFGHSEANTNYFKKAVEDYRQNQLKFIGWYSNLSEGISAEVAIRSKQSEKKAFAIIVPVYSPEDKLVCGYLAGYLLNDIVADSFDRFRFGFYKRGNFIYVDPNNIAVNPFEEYNETSRVSSKFLNVLKDVFSKPPFPSNIASEVSVYTIDRILLSEMGEDCYYAMLPISSKLGEKSGVLIARLPYKDIYGVISSLRFQYILYSVLGIIALSIVLSIRIDRIISFRLNAIRVLVQDMVKGNLDKDYALDDDENTLDELGMLSLQVVKMKKAISVAISSVLRNISYVNKASLEVASSSQNLSSSALQQASALEEMSANVEQIASGVNMSANNSYETEQIALKTNENSQIGGRAVEESVIAMQDIVEKVSVIEEIARKTNLLALNAAIEAARAGDEGKGFAVVASEIRKLADLSKISALEIGELVEDNSKVATEAGVIFKEMLPEIEETANLVKKISEGSSKQSDQIAQFKMALDQVGEVVQSSASSSEQLSSMSDKMLEKSKELRKSVLFFKIKDSKIENPENDDYDFRLIDCPENSFKDENQNLKSNGISTSNASGHNNYSLDIESESSVRTINKRVDPKKAIDIADKDLNFDDDFSEF

SEQ ID NO: 452 - protein, 317 aa, Borrelia burgdorferi s.s.
MDLISFSVPGNLLLMGEYTILEEKGLGLAIAINKRAFFSFKKSDSWRFFSKKKKIDDFSLIENRSDFVFKMFAYLSQNCFFNLENFAYDVYIDTSNFFFNDGTKKGFGSSAVVAIGIVCGLFLIHNATNVVEKGEIFKYCLEAYRYSQGGIGSGYDIATSIFGGVIEFEGGFNPKCRQLGAVEFNDFYLMQGLQAIKTTTSICEYNKHRNSILDFILKCNLEMKKLVLNASNSKSALISSLRRAKELGLAIGEAIGVSAALPSSFDHLLGQCDLIKALGAGNETFLVYRPNIEAFNLSKIISIVLENEGIKFESDKC

SEQ ID NO: 453 - protein, 523 aa, Borrelia burgdorferi s.s.
MKYLQTVASMKSKFDIVAIVEQYIKLVKSGSAYKGLCPFHAEKTPSFFVNPLQGYFYCFGCKKGGDVIGFLMDMEKINYNDALKILCEKSGIHYDDLKISRGSENKNENKDMVSKIYSLNSRLINTIKFFLSKNKKALDYVLKSRAISKEIVDLFELGYLPFNFKNGLELHDFLVSKGYSSEVLRKSGLFSKTNPKVSILFQRLIFPIKDFKGNVVGFGGRDLDGKGSKYINLGETEVFKKRELLYGFYEGFEEIKSTKSVILVEGYIDVLAFFTSGIKRAVSTLGTAFSKEHLALIQRYADEIIFSFDGDDAGLSATLKAYQICLPFNINVSVVRMDFGTDPADVLKSEGVDSLQKILNNRCDAFEYLLDVYSNKYNLNKTVDLNAMINLFLNLINLSKVDTQKKIFLDKLSNKLGIGVTTLLKDYYRIKERFVVDNNKRNLYAHNDDSYERYLIVALLKNFSYFSIVRRNIIDSDLINVDARKVFMCFENLFENNKDFSLMDLKKNLKDTYKVSEFFLKKF

SEQ ID NO: 454 - protein, 225 aa, Borrelia burgdorferi s.s.
MKKPIFKENTIYSSKFDDIYYNPKQGIEESFYTFIKGCNLDLELKTKKNILIAELGFGTGLNFICLLKFIKENNITSKINYYSIEKFPLEKKTIMQISKFFAKETAYFKLMLKNYSKIPKKNLKLKITENVNLKILIGDAKIKIKEIPENVEYWFLDGFNPKKNPEMWSNEIFNLISEKSSPKCKLSTFSSARIVKDGLKLANFKYIHIEKGFGNKRHMIKAQKN

SEQ ID NO: 455 - protein, 700 aa, Borrelia burgdorferi s.s.
MKKMLLIFSFFLIFLNGFPVSAREVDREKLKDFVNMDLEFVNYKGPYDSTNTYEQIVGIGEFLARPLTNSNSNSSYYGKYFINRFIDDQDKKASVDVFSIGSKSELDSILNLRRILTGYLIKSFDYDRSSAELIAKVITIYNAVYRGDLDYYKGFYIEAALKSLSKENAGLSRVYSQWAGKTQIFIPLKKDILSGNIESDIDIDSLVTDKVVAALLSENEAGVNFARDITDIQGETHKADQDKIDIELDNIHESDSNITETIENLRDQLEKATDEEHKKEIESQVDAKKKQKEELDKKAINLDKAQQKLDSAEDNLDVQRNTVREKIQEDINEINKEKNLPKPGDVSSPKVDKQLQIKESLEDLQEQLKETGDENQKREIEKQIEIKKSDEKLLKSKDDKASKDGKALDLDRELNSKASSKEKSKAKEEEITKGKSQKSLGDLNNDENLMMPEDQKLPEVKKLDSKKEFKPVSEVEKLDKIFKSNNNVGELSPLDKSSYKDIDSKEETVNKDVNLQKTKPQVKDQVTSLNEDLTTMSIDSSSPVFLEVIDPITNLGTLQLIDLNTGVRLKESTQQGIQRYGIYEREKDLVVIKMDSGKAKLQILDKLENLKVVSESNFEINKNSSLYVDSKMILVAVRDKDSSNDWRLAKFSPKNLDEFILSENKIMPFTSFSVRKNFIYLQDEFKSLVILDVNTLKKVK

SEQ ID NO: 456 - protein, 339 aa, Borrelia burgdorferi s.s.
VFMTKPKIFSINKEKIKILIIVVLTSTFLLGIIFSNENKVARILEEKFFDFDFNLISKIETELEGTLTKLGKDWILTYNKQNIPVDNKKVNSLIKALDELQKNKLVSRDQKKHKELGIGENPSFKLFDNNNKLLTEIFVGKSGEGDSRLAYIKGSDENVYLTKNIFLSYKGNSYNTFSDTTLFQEKNTKLENLSFKIIRKLNKENENNINNNYEIISKDGLYFLNNQKMTKERPLNIIAEFKADGLEIDKSKIDDYNLQYKIEVKWSNKSVNNIEVYFNKNEENDKDILIKKDKDEYYYTTSKWTFFDVFDLEKKLTEKDDISSNDNQEDHHEHHNNAD

SEQ ID NO: 457 - protein, 309 aa, Borrelia burgdorferi s.s.
MINVEKVTKMYGPFTALFNVSFKVEEGEVLGILGPNGAGKSTLIKILTSFHYPSKGNVKIFGKDIVEHSKEILQQIGYVPEKLALYPELSVKEYLKFISEIKGVKKLKKEIDRVISIFKLKEVEDKLISQLSKGFRQRVGIAGALINNPKLVILDEPTNGLDPNQIIEFKEFLRELAKESTILFSSHILSEVESICKRIIIVNNGVIVADDTKENIIKNKLKEIEIELIVSKKSENEKKIFNSKNDIFSLIKLEEHEKDLNISLKLSQGKTEEDLFSYIVKNNIILKAMIPKHESLEKIFSKLTKEREK

SEQ ID NO: 458 - protein, 124 aa, Borrelia burgdorferi s.s.
LDLQIITNCNKLSLNMELNEYQEKAKKTAKYKNKKEELILTTLGLAGETGEVVEKIKKLGRDKNYIIDDEYLISIKKELGDVLWYLSSLSNNLGITLEDVALTNLKKIQKRHENGTINGEGDDR

SEQ ID NO: 459 - protein, 348 aa, Borrelia burgdorferi s.s.
MTMLPKIAKEIINEYDQKILPNAILLLGEKFSSKKISAIELAKKILNGKNLTNPNLLIFSNLDTVEAKAHLSTNSQKIANKYLEYIKTVIFTKCYFSNEKNLKKIEKNINYINSVYYEKEYNENIKNELIKNIENINKELNHSITVYDVKKIQTWIFSEKEKPKVIYINEIENLSFNVHNSLLKILEEPPSNIYFILAARNKNKIPKTILSRLRVYNFAKLDRSLEIQRFKESFLINKDITIEEYFASFYKEESKKIKKELAKILNIIKEKKSIFNLEEVDFIKDEQSFKIFLNELTINIRKDFLENKIDINQYLKYTEHLKNIYKYRPYNQNKKLIIENLMLNYEEI

SEQ ID NO: 460 - protein, 335 aa, Borrelia burgdorferi s.s.
MNKLMLMLITFATSLLAQTNKASTGLKTDQSFNNSLSESVKLKEIADIYPTNTNFLTGIGIVAGLAGKGDSIKQKDLIIKILEENNIINEIGSNNIESKNIALVNVSLQVKGNTIKGSKHKACVASILDSKDLTNGILLKTNLKNKEGEIIAIASGITQPNNKLKGSGYTIDSVIINENQNINHSYNIILKKGNYTLINRIHKILTSKKINNKIKSDSTIEIEAKNISLLEEIENIKIETNPKILIDKKNGIILASENAKIGTFTFSIEKDNQNIFLSKNNKTTIQVNSMKLNEFILKNSNNLSNKELIQIIQAAQKINKLNGELILEEIDGNQN

SEQ ID NO: 461 - protein, 394 aa, Borrelia burgdorferi s.s.
LRKDLIFLFLIVLIIASVVIFFIRSSKKELVYFELNTKSNISFLFLIEDLNKNLVSMQEIFINMKTGNIGFFDIPIHTGYEDLKGNISWFKDLYKKNSFNKFLSKIYTQLSHESDYYIRFQKENFVRLIDYLGGVRLLVKNPVKVYSFEDSILIPSGTSNFDGDKAYDYLRYFNDVNQFEERVEFFKEFFKRLLFQISDFGIENDSFFKIYSMLDTNLSEVVFKYIVKNYKINNDKIISINIKGQEEIFKDNDNNLIKVVFPYYGGAILKESVDKLNKELVNEGAEEIVKIVVLNGTKVVGLAKKTANIFNSLKFKVLKFGNADKNSYKNTLIINNSDNLEMAVRVGEVIKTSNIKPISEVQAKRLLELDNLDINPDVIVILGDDFDGRYVKSK

SEQ ID NO: 462 - protein, 639 aa, Borrelia burgdorferi s.s.
MNGNNNMNNNGKSNNKKKNKNWILGLVVVFLISAIFMSYFIRGGESYKNVPYSTFQSYLDNGLVESVVIIDKNLIQFVVKGSNFAKSYFSTSIPYLDINLLSELKNKKVELSSGKSQASLIGVLLQTLPWILFFIFFFFIFRQTQGGGGKVFTFGKSNAQKYEAGKNKITFKDVAGQEEVKQELREVVEFLKNPKKFEKIGAKIPKGVLLVGSPGTGKTLLAKAVAGEAGVSFFHMSGSDFVEMFVGVGASRVRDLFDNARKNSPCIIFIDELDAVGRSRGAGLGGGHDEREQTLNQLLVEMDGFGTHTNVIVMAATNRPDVLDSALLRPGRFDRQVTVSLPDIKEREAILNIHSLKTKLSKDINLQVIARATPGASGADLANLINEGALIAARNNQDEILMKDMEEARDKILMGVAKKSMTITDRQKLETAYHEAGHALLHYYLEHADPLHKVTIIPRGRALGVAFSLPREDRLSINKHQILDKIKICYGGYASEQINLGVTTAGVQNDLMQATSLAKKMVTEWGMGEEVGPIFLVDDEAPIFLPKEFSKAKAYSENTADKVDREVKRILEECLKEASDILLKHKDQLVKLAKELVLKETLTDKEVRELLGFEANKDEYDLFSSDSTTKEVKGEDVKG

SEQ ID NO: 463 - protein, 1465 aa, Borrelia burgdorferi s.s.
  misc_feature (799)..(799): Xaa can be any naturally occurring amino acid
MNLLFLRSKTFILLILPFFIFVLIIFSINLFVQAQIYSAKFFAIKYLESKFGFKIKYDKISPYFLSSIKIDGLELSLDGKDKILIDIVRIDLNLFKLILGDENIILNVYVKGSNFNFDINDFSLSGDLNPSNAYSDNENTVFNKILNYLYRLNINLENININIKLNDNSWLNFQVKNFSLSTVDEDFLFSSVVDFSAVKNLEINLPFERVDDGILDSTFYFEGKFKKGFEDGYVNFSFFEFKTSYFSLLEQGFQINYSKGNLKIFNLRRENFDFNLSYDKANGFVRLDALFFNVSLLDWIKLNKGFEIYKDYFDISLNGQLAFSYDFKDKDLRYAGIIDSSLNVDTIGKEVQGLQLEIKGDDRIVSVKNAFLKLKRGVVNYKGYYSLKDLLPMGRLNFKSAKILNFNDLNGYLDFNKDKDIFSVKSDNFSLGNLSFQNLILKTYFLKDKIFVDYLIYLENKNSQISLKGDLNDEEFSLSLGIKEFPLLFLKEVIPSSHLINFFPKTLFSGKYLNLVSDFNFNKFNYHKNKLKKFNFMVFSKLDNFKFVLDASGEKNFYKSNNFDLQYNDHNLHSNLFVELFESGFNISTNFSYLNKVYPLHFNVNLKDKFIVAESPLGIKLDFNYFDSKVVYTLNVNDFKVYNKTSDLLININFNGNYLGLNEDLKFKIDEFNIIKVSKTPAYNFNFGFKGLYEYDKLYISDVKLINKLSNLQGYGQFNLKDNFNGSLNLFSSLNSERYFLGVNSDEYGSYFLLKFQDLDFYNFNSFSLLEGKVNGNFLLNFKKNDFKNYSLSGYLEAXKLTFLGVPVQFSMNLGLLDNKLNIYDIKAKRNKKEFLTGSLRYDLSSSIGVSNIVFNSDLFSYRFNANFRNFQSGVEEQFGVLKTKTEGEFFFRDIKYKNESLSNLTIEFSNDFEKFNMASIDYDLVNVLYHYGSGEYSFILKDYLPLSFNSSGKIIKNKILGNVRDIKFDSKIITKDFLDSHSLFNVDNHFILYDLVLNGEFDIDGDLYNPNINGSLNIQKGSISTEYLRASRKFGGDRALEIFDMPVAIQDNKIIFSNEFNLDRYSKIFVSTSLNLNFLSDTIIDYYKIDINVTGRTGVPIKFEKIALSFTGYALGDFSIEGNADEIMFKGILNISNAWVYSLESSVVDLLINPFKRAKRLQTDINLLDFDILTDLEINFDSGVTFHWPDSNISFLQATISRGDKLVIKSDTKTDDFIIKGDLNIASGFVNYNNKKFIFKSGSYISFNESRAKFDPWIKAEATNTIKDRNDKLLVTISIDSPLSLWKIEFMSYPSRNEQEIKYLLSGSTIGGYEGGLRSAGTNAAEMAIGIVSDIALDFLIQPIEDYMRSVLNLDLLSIKTDILKNSINSNFFKIGNPTFVDVLDNTSVKVGKYLVEGVFISGGFGFLKEQMSPFSKDLNFVVNLGIEFDSPFFLVNYEFDYNFMKKGLDGIGNNIGISWKFKY

SEQ ID NO: 464 - protein, 185 aa, Borrelia burgdorferi s.s.
LINAMEKFVFFLILPLFFLLSFNVFSIDVIKIGIVDFDRIVIEVLNPQLKANLDQIKNRYQEQINTLNLELKNLKHMYDKSIADNDLDNARSFGNQYNLKVDELKRVSSLAKNNLEQQRLANINSLNNNSESLSKILRGIQYVAEINGFSLIMKKNNPYILYHNSTVDITNDVVKHLLEKDNKNP

SEQ ID NO: 465 - protein, 274 aa, Borrelia burgdorferi s.s.
MLKTLTKIITISCLIVGCASLPYTPPKQNLNYLMELLPGANLYAHVNLIKNRSIYNSLSPKYKSVLGLISNLYFSYKKENNDFALLIMGNFPKDIFWGIHKNRNTESIGNIFTNPKWKLKNSNIYIIPNKARTSIAITQKDITAKDNNMLTTKYIGEIEKNEMFFWIQDPTLLLPNQIVSSKNLIPFSSGTLSINSLNQEEYIFKSLIKTNNPPILKILSKKLIPTVLTNMTNLTISSHIKTTIKDQNTVEIEFNIQKSSVESLIEKLASNIQT

SEQ ID NO: 466 - protein, 323 aa, Borrelia burgdorferi s.s.
MKKKNLSIYMIMLISLLSCNTSDPNELTRKKMQDKNVKILGFLEKIQADNKEIVEKHIEKKEKQMVQAASVAPINVESNFPYYLQEEIEIKEEELVPNTDEEKKAEKAISDGSLEFAKLVDDENKLKNESAQLESSFNNVYKEILELADLIQAEVHVAGRINSYIKKRKTTKEKEYKKREIKNKIEKQALIKLFNQLLEKRGDIENLHTQLNSGLSERASAKYFFEKAKETLKAAITERLNNKRKNRPWWARRTHSNLAIQAKNEAEDALNQLSTSSFRILEAMKIKEDVKQLLEEVKSFLDSSKSKIFSSGDRLYDFLETSK

SEQ ID NO: 467 - protein, 169 aa, Borrelia burgdorferi s.s.
LKKTIIVFIILAFMLNCKNKSNDAEPNNDLDEKSQAKSNLVDEDRIEFSKATPLEKLVSRLNLNNTEKETLTFLTNLLKEKLVDPNIGLHFKNSGGDESKIEESVQKFLSELKEDEIKDLLAKIKENKDKKEKDPEELNTYKSILASGFDGIFNQADSKTTLNKLKDTI

SEQ ID NO: 468 - protein, 282 aa, Borrelia burgdorferi s.s.
LKRVIVSFVVLILGCNLDDNSKMERKGSNKLIRESGSDRRGQENRALGAMNFGLFSGDSGVVYDLQNYETLKALENKNKFIDYSKIEFLEGTKSINAFIWAVSVRWIKIKARDLFGECGDFIKELKGIKYSYLVSPVDGSYISYAMPIIVFETTRESDPLYSVSGFKLISKGNDINFNENKSGFWGRLPMSEKSVESGLVTAYPFGSSDAKKVIEAFASLYNNGTWSDMIAEITIKSKQYPKNEKVYRITLDSQLFNVAMKKIIEKYPKIKSASFAFNSLIN

SEQ ID NO: 469 - protein, 181 aa, Borrelia burgdorferi s.s.
VEIKINKRNLSESVREEEQALVHYNKLKEKLNINFQKEIYCKIEAMKVLKEIKDKEYYKLDNYSSFDDFAKDYRLARTQTYKYLKIATAIEEGLIEEKYVVKNGINDTICLLKTKESPSLKKSNQNPIKPLRFQLKKEEAYSFYKKNPKLTSFLLEKIFFKEKDFLLKIIKEFETLRNKRK

SEQ ID NO: 470 - protein, 191 aa, Borrelia burgdorferi s.s.
MIKCNNKTFNNLLKLTILVNLLISCGLTGATKIRLERSAKDITDEIDAIKKDAALKGVNFDAFKDKKTGSGVSENPFILEAKVRATTVAEKFVIAIEEEATKLKETGSSGEFSAMYDLMFEVSKPLQKLGIQEMTKTVSDAAEENPPTTAQGVLEIAKKMREKLQRVHTKNYCTLKKKENSTFTDEKCKNN

SEQ ID NO: 471 - protein, 529 aa, Borrelia burgdorferi s.s.
MIIKKRGLLILGIATVISCSAMSKPKDDIVFGVGIGNEPTSLDPQFCSDRLGNLIINELFVGLLRGDPKTGGYRPGLAKNWDISYDNTCYTFHLRDDIYWSDGIKITASTIRDSYIMALENELDVPHINLLTSKIKNAQEFYETKLNADEVGVKVINEQTLEITLSRPARYFLDMLTHPIFIPIPTHIVKKFGNKWTSSENMVTSGPFKLKRRILNEEISLEKNEKFYDAKNVAINELIFVTINDTRRIYSMYEHNEIDAIFNNIPLSLINELILREDFYSADINQIGFFSLNTNVKPLNNVKVREALALAVDRETLTYRVLDNNFKATRKISPNINNYNYGKKLKPYNPRKAEKLLAEAGYPDGKNFPTLTIKYNKNDLEKEVASFIQSQWKKVLNIDVEIEPETWVNHISNILKGQYEISVRSWQGDYLDPMAFFNIFETKNSHFASYGYSNPELDELIIKSDLEEDEKLRLEILKKIEEIIIENDYPIIPIYSVAGNYLFKNDKWLGWNTNNSERFALSEIKPIEE

SEQ ID NO: 472 - protein, 217 aa, Borrelia burgdorferi s.s.
MKGISILSLLLLAFSCKQYGSVKALTEIASDSGDNNSLVVSDNLAAKELIAEKGPTLTSQESERLEALKTFLKDAMGVNGKTGDTKAEYDKSYKEFFDWLSKDVNKQKEFVSCFNNICGIVTKAVDASKQRYKGNQQSLGFNEYVCYDIKTRTGDDLSLFFQKVADAFGAEEYKKKDDESSQKPEKCNEEIFKVIKRVFTESDSNNELKNLKNHGNI

SEQ ID NO: 473 - protein, 414 aa, Borrelia burgdorferi s.s.
LNGKLRKALKIAIFTTLLLVISCNANMDTNDKNKALNEYKLKNISEVIKNSLQLESDPKLKKEPESNINQSTPPILEIEKIEPGKQEMSLKSEFGSESLMPLEEPEEANMAKSEEEIAKIQEKLLLIGASDEITDQELGENMQKFLNPTTVEFKISTTTNETILTTIEEEEINNNKDKIFDHKEENVTLGNNSLENATLNKNTITLAQNQKYTTHLKNDDKFITKEYLKQVRDSLDKALNAIKNLETSKEFRELENLPKDQENSPSAKKESTESNINNTNTENIEIIKNRLLEELNKSELIFEDTKDPLGTSTIKKVIDAAKKWQEKENSSQIDWDLGFKFHPNPKFYNKLTAQEYKVLAEKFTKVKNEYKNTKEQLKAESKLTTNSISKIINATKEFANQVINLILLVEKNYQ

SEQ ID NO: 474 - protein, 296 aa, Borrelia burgdorferi s.s.
LKRNKIWKTLKLFQITLLFSCSFYSKSNNTEAISELQSSPIKLGKIKVLQKTEKIVSTQNLQNLQQSQFFKNEKEKIIKKIAQEFDENEKLINKIGPNIEMFAQTINTDIQKIEPNDQFGINKTLFTEKKDNNIDFMLKDNRLRRLFYSSLNYDENKIKKLATILAQTSSSNDYHYTLIGLIFWTGFKIQEAFESAVNILTKDEQKRLIFNFRTKTVKEIQENFEKLMQERNSWIKIVDNIIGEYDKNTGGCKADGKILGEVIRVGYEHELDSNKSMQILNNIETPLKTCCDHIHY

SEQ ID NO: 475 - protein, 365 aa, Borrelia burgdorferi s.s.
MKEIGISIYPNVSPKNKIIKYLEKSAHFGFTQVFTSLLYINGNEFDIFKELLSIANKNGMKPIIDVSPEIFKELGIDLSNLRNCPKLDYFKKLGAWAIRLDNTFTGIEESLMTFNDSDLKIQLNISNINKHIDTIMYFKPNIKNLLGCHNFYPHKYTGLSRNFFKETTKIFKHYSIPTAAFISSNNAEECARGKEKEGVPTLESHRSKDIETQAKDLFKEGIDTVLISNCFPSETELKKVSKVNRNILELKADLNPDANSVEKEIILENLHFNRGDINSYRIRSTMPRVYYNNKKFPVHSPNEIKKGDILIDSSEYLGYTGELQIALKDTPNNGLVNVVGKIINDEIYLLEKIEPWEKFKIIENK

SEQ ID NO: 476 - protein, 530 aa, Borrelia burgdorferi s.s.
MKILIKKLKVVLFLNLILLISCVNESNRNKLVFKLNIGSEPATLDAQLINDTVGSGIVSQMFLGILDGDPRTGGYRPGLAKSWDISDDGVVYTFHLRDNLVWSDGVSITAEGIRKSYLRILDKETGSSFVNMIKSVIKNAEEYFDGKANESELGIKALDEKTLEITLKSPKPYFLDMLVHQTFIPVPMHVIEKYGQRWTDPENMVVSGPFKLKSRVLNEKVVLEKNNKYYNSKDVVLDSIIFFVTDNSITAYNMYLNDELDAIFKNVPPDLLKDLKLRDDYYSMGINSTSFYSLNMKVKPLDNVKVRKALSFAIDRKTLTESVLNDSSIPTRRATPDYIDYSYKSNLSLFDAEMAKKLLADAGYPNGNNFPLLKVKYNTSDSQRKIAEFIQNQWKKNLNINVQLENEEWSTYINSRVNGNYEIIRSGWSGDYADPMTFLSIFQTENTSFSSYGYSNSEYDELLIKSDNERDIFKRQEILKKAEAIIIERDFPAVFLNITSSSYLFRNDKWKGWEPNISERFNLSEIKPIK

SEQ ID NO: 477 - protein, 404 aa, Borrelia burgdorferi s.s.
MPNKITKEALTFDDVSLIPRKSSVLPSEVSLKTQLTKNISLNIPFLSSAMDTVTESQMAIAIAKEGGIGIIHKNMSIEAQRKEIEKVKTYKFQKTINTNGDTNEQKPEIFTAKQHLEKSDAYKNAEHKEDFPNACKDLNNKLRVGAAVSIDIDTIERVEELVKAHVDILVIDSAHGHSTRIIELIKKIKTKYPNLDLIAGNIVTKEAALDLISVGADCLKVGIGPGSICTTRIVAGVGVPQITAICDVYEACNNTNICIIADGGIRFSGDVVKAIAAGADSVMIGNLFAGTKESPSEEIIYNGKKFKSYVGMGSISAMKRGSKSRYFQLENNEPKKLVPEGIEGMVPYSGKLKDILTQLKGGLMSGMGYLGAATISDLKINSKFVKISHSSLKESHPHDVFSIT

SEQ ID NO: 478 - protein, 212 aa, Borrelia burgdorferi s.s.; identical to SEQ ID NO: 225

SEQ ID NO: 479 - protein, 369 aa, Borrelia burgdorferi s.s.
MENSKKNTLCQNKTQHKSIVLISTLEYINKTHNKYTQKNILYYFNENLKRNGQLPVKIKTLQNYLYKLEKEIKVTTNYHKHLGVNCGTEIYYQLNFSKKECYQKIYKYFQEKKDLRFQNRATRGLKDRFTKNGSVDLKECLNNKNNIKEERKINEIEKYQVRNYFNKCNFLCKKILSIFLTILFNLDIDKDNIIKILKIIKIIEIKLLKNKNIHFTKSCMKEKQEKLKKILCNTQKEFEKNEYNPKQLEISFQKIYENYKFKPHFIIESHKYSDLNNIKRKLEKSIERKKENSQQNYQDLKTNIFNILIEQLKKEVNIELLKPIIKEYLNNQKKIEYNKVFCTYYCELLELIKNQKSLLNLKELDRKAI

SEQ ID NO: 480 - protein, 1098 aa, Borrelia burgdorferi s.s.
MKLDEIIIPLSMSISNNQKLDAIAETLKKIAEQKFSSLDDLKSKLEKSAKSGSNLEKALNKSSQNAIKNFKSLANSVNSVNSKAGSMKSIGKVLKSVGKGLGSVKNLANKTGEAFNQMLAAFAPIIMAVKAIQAIGSTISGIFDGAMDALDEFNEEVSTFSDMLGNEDLGKSLAESMRAFGDETLFTRDAIANATKTMLSYGATASEVEERIRMFGEAAGGSSEGLEKLAEVYSRVESSNQVNLEDLYALRDAGVDITDILAEEAGLAGEALYKAASDGKIGFDALNKALSKATSEGGKFYGNTAKEAKTLAQAQQQTAKMSEKLFLDIGKALEPMMIGFEKVKQFLMVAIMVPLTKVTTATIYLTTKLGELVAYLAGKWVQGMKMLFKAITTPFVKLYEGIKYVIGKLKELATYVSSGFLDRFKGAFEPIIKWVQKLIDMISKAYTKLKNLVTFWKKAEKEKDTSGSEPERDKKFDPNAKTNINKKMAEDYQKLQDEIFNRQRDIYNKTGKAREQALRNLEKTINEKNQKFKDEYSKIFDQLTDENKKILVGVEKSVNEFNNSNYDFVNEYQNLLKEKESREREIIKTLPHTDQVSALQKLNDEINEKNKAFVEKYGKSFETLNESNRQVVVALEKQVNEYEKTALDRSFVEAQKALQKEITDLEWETMLLPAKERASAEKKMASKIQAMYKKFVDEHKSQFKKLNETNRNTIKQYAEKAQDTTKSLYDSMIDGLNVFKNAFMKDIAGKFLNKDTGESIGEEFHNLINGKDVNWGEGLEKMTTQMYESWKTGLKTAAGAVFGPWGEAVAELINGLTDFVWGILKGQEKARIKAIEKKRDEDLEELEKRSEVELKKLEDRFDEEIKMRKEKLSELDDEYTKEIEFLKQAQSKGQISGEEFQKRLHDVQTEYKTKKDIETTQLTKTEEAKKLEVERKNKLSKLEPERIKAQAEVDKVNAEDWWNLGKPDRLRKTQKILDEILKRIAKVKSAGSIEEIKLAHGGARFVSNKPTYMPNSGVMSSEFGQPELVRITPAPIDENLRKLEAKIIAEEITKLQKTQSSTVVNNFYYNFNGDVLDAEKLVRMLKSKEHLMGFRMAE

SEQ ID NO: 481 - protein, 142 aa, Borrelia burgdorferi s.s.
MVINVNLTGRVMLPYIPDYIRNGKEKIKEEEKAYVVLKDINYGFVENLKARQIELFKKLNGENGKTNSNAMIESTSAQIQFVKKIWDENVVGFVGLENQQGEVITKEMVEGDAILFQDMLSSLAIEINFLADTLRVERVSKK

SEQ ID NO: 482 - protein, 396 aa, Borrelia burgdorferi s.s.
MRLRRLPVYVDAYKEKPNAEIFIYYSSRGTGKTYDIATVNLERKFSADGGDTLAIRKKKNKTTQSIHKEILELLSIYNLRKFFNISKAKIESKSLIFGKKRAFVFEGGHDTRDLKSYAHFKDLWLEEANQFSADDIEMLVPTMREQGGRIYMSSNPVPKSHWLYKRYLSNQDNPAVCIIKSTYRDNPFLNGGDVQAWLEKQRLAYHGNDIGFRIEVLGEEFDFGTARLIKKFNVCGPEILSRANGSYYTGIHVKGNRICFLEILVGRISYLPVVIITNACSKVLLSKTDYQSEINKFKGVFVLPTAREELKYVFSRFGRGTLLAKKRNLYSLSDYLIPSNLNVVNKPETTDVISEFNETEYYYDESSAEDSEVTNFVMQKDLVYIPAFLNAISVFS

SEQ ID NO: 483 - protein, 260 aa, Borrelia burgdorferi s.s.
MLSDDDFENIKKRLQADNIKIQFGVGTMEEAKNYVGKLGEPIVVKDKELFAICNGKDTTNRKYYPINKNTKPPIGENIDDYLKDLVNWCLENTYPGFLTAEFVEQGSISRSKLVQAFEDTKKFCIPDGRPLPDNCFVKEKFGISLAPKLSGRFLRHYDSGGSTDSDGTRSLGHTQEDSYKSHDHDLDLSVLDSLRGRLVTDYSSIRRDSNWSTGSTSFVTHIEYGEPIQSWRYPSYTKYSGDDETRPKNTCYISFYRYDW

SEQ ID NO: 484 - protein, 896 aa, Borrelia burgdorferi s.s.
LYLGVTKNTAEDKDCIKLKDQDNSSQESEALNQETEKGAETEEISNPKEDTSENCTSLGLDIVFYTDEGQIFELTPFVDTTSIVLEEKIVDPSLKTAASTFSFSVSGLSEEFLNFLFFRNEDIFVKVNDKNNPVFRGILEKFFSRDLFNSTKSVSFTVNDYSSLLKIAFENPVQFPINFLPDWLFVYNPLAKELSLVHLIIEKTKLKDLIDDDASEAILDKVPAVIIDSGEDVETILQALLYEFGYAYTFSSVGKLQILPIWKSEVITKEIEICTVDAESYVMSKSSSSSYDSTKVIWREGKFQSKEEAMSKKRPLYSAPINVAGTDGALYVAVLQKGVVYPDFADKVGSSVFQEYDPSWLDTVYKWDFKRREVWHDHYAINEHLAIISTHNLEVRFSADSSIKLENKEYFPTKAKLWFRNTSSSQGSKYIYHFDIYGDVFYTIAQNVLQTDNADDFYSKKFEYTTRFIFSEDSALRLFEFLTNLRVKGHTIVNFRSMQNLNITDFVKLRLDNIGIDHFFLILSKKITNFDLDIKLYEYEGITWGDYTHYEYLTTSTKIGISDYLSGAHKVVIAPFNYDGAETYQFKASGFKDENTLNGSIEFAKQAGLNKIKLLKGDFYIYDQVKLNNLEIEGDDEVFIRSTGFSKHIFTSEKSFRLSGVNICQQPMSELYINGGDLNQQELAPYLEDKSFTQPAVVVLCSSYSLQEEARSSVYVTDASFVYIKNVTFTCALNKALHFKKTKKILLEDVNFDSTNQSFDIENVTNLTLINVNAQGSKTASVANGLNAIIRESFFTNNTNALKLSNFSSLKITDTQFIKNSGTALHLQDITSARLSNNTFTENKVGLENHAFDLIVRDTFVKNTLALNLARKSNAGVRTLDLSTYMENTKDKQEVA

SEQ ID NO: 485 - protein, 142 aa, Borrelia burgdorferi s.s.
VALGGKMRIRMKHLVRRLYLRRDKIWHVYRSTEIQNKAKDKSITNFPKLEPEDFDYEYIYKFVDEWIQKKYNDKLGFTIQKVDGLEYICKAKRYASLKKILARIVKDYKDIFLGRLQKNVAGAQAGSGGSGGKGSKPAGTGG

SEQ ID NO: 486 - protein, 222 aa, Borrelia burgdorferi s.s.
MKAVLATTNITEDQIYREFLRLGMEQLIAQDLSKRYYHNELTYRDLENLEKQFGIRFENLISEISFLEKNLQKDIFNLDAKIDSVEKNLQKDIFNLDAKIDSVEKNLQKDIFNLDAKIDSVEKNLQKDIFNLDAKIDSVEKNLQKDIFNLDAKIDSVEKNLQKDIFNLAQALKKEVQINSQFLLEKLKVSNRIIIIITVIIVPIAISSITNIVMLLIAKFFK

SEQ ID NO: 487 - protein, 1277 aa, Borrelia burgdorferi s.s.
  misc_feature (186)..(186): Xaa can be any naturally occurring amino acid
  misc_feature (573)..(573): Xaa can be any naturally occurring amino acid
MKTNDIVKTNNPNISLYKQLSKDFIKKENINKLKDFFILIKNKLFSIDDNSTEANIESLLKYIFEELNYSVEQQKAGQIEGVESRVDILLFENDKDKASFNNKLKEAKKNNEPIPIEDILIIAEVKRPTFSFDAKDKLKESEDQLYRYLNQYQKHYGILSNGKVWRLYDKSKVLYGEKRYIEFNFXKIEEKEEYKEQEWFVLFIYLIRKERYLKTSNVIEVEKEQIAKEKEIIQKTLKEILYERPDDSIVFKIAKNIYDKEFKLSGKEITQHILASILEESIIFILRIFFIAYIEDNDIFKKILQENKLYRSSISFRYFFYDENTKKKLEYKKIITIFNLLDKGSDAIKFPVFNGGLFSEDKVKYLNNEGLLSISEIEEILVKMLFFEEKNIKDEKFVKYSRLDPKSFGELYETLLEYDLRIADTTVHRIIEDGVYLIRTEEELENKKVNKIATYLKGNIYLTSRSLDRKKSGAYYTPDDLTDFMVISSIEEQLKTKSPLDIKIIDNSCGSGHFLISCLDYLTEKVWYELDKFEDVKKELDEEYRVIIEESEEYDVQDSISKELVLKRMLLKXCIYGVDINPISVEITMLSLWINTFIFGTPLSFIEHHIKAGNALLGYTKDEFFDIVKKKFESGFSLFKKRIKEIITILEDIYQKIKGINDTTKEDIEKSKKIYKEYEESKDIDNLRIIFSLIKLYSLSFDKSLNMEFSDIASVISLIENILGNKTSSEDKEKIEKIRKLSSYYKFFHYGIEFPDIQEGFDIVIGNPPWEKTKFNETEFFSKHIPNYRKLGIKEQNIIKQEILSKDNHPLSIEYNEEKNSIIAINNIYKFDFKCFTSGGDPNLFRYFVTFNLKLIKEKGNLTYLVPSAIWNESSSRILRKHIFARYKLNYIYQFENKKRFKDVHSSFKFAIFQLSNIKESTSSFKAKFMIQSSDNILKEITRDLKDSKDDAYKGIELNINQIKKLSPIQESIIEFKDNEEFTLINKMFSKFSALGEGYIDFKKGLDPSIKNRKSLLKECNNKNLIFLYSGANIHQFNSRFFEDKDAKESSKLLWIDKEDLEKVLTKDNQYQTERVFYRAIASNTNERTMISTLSPGNCYCVNSIYINDEKTPISLYKKLFIISIFNSFVFDFLLRRFVDSNVLKSCLYQCPMPQPEEKEILSNPLYLNLAKNTSLLIAKNDPENFKYLLYLEYFKFDKEKVNKILKLDKEDEFFKEKENENNFIIASLYSLAKEDFITLLGDFKALKNKKKGEDYISSLIKGYDNYLLNNKIFYHK

SEQ ID NO: 488 - protein, 278 aa, Borrelia burgdorferi s.s.
MKNFKLNTIKLNVITAILTLICISCAPFGNVNPNKLKNPITSKNLKKPKRSNHSRNLKKTNSHTNSENSAENNQNLENESQNSKSSNQNPQEETAISKLEKIGKDLEAQKKEKDTQIEKISSDAQYDFLENFKLHNYDYFMHNTKMTLKKIIYSSLNYEKEKILTLKEILEKLDTEDNNRRIAGQFLETSRDIQLQQEDLILKKIQDTLQTLSKEKAEELLQHAERDLKIKQNFVKALNATIEAYNKNSDNIKIDNKALANHMEKKYSHPLYLLDQAD

SEQ ID NO: 489 - protein, 354 aa, Borrelia burgdorferi s.s.
MKKVKSKYLALGLLFGFISCDLFIRYEMKEESPGLFDKGNSILETSEESIKKPMNKKGKGKIARKKGKSKVSRKEPYIHSLKRDSANKSNFLQKNVILEEESLKTELLKEQSETRKEKIQKQQDEYKGMTQGSLNSLSGESGELEEPIESNEIDLTIDSDLRPKSSLQGIAGSNSISYTDEIEEEDYDQYYLDEYDEEDEEEIRLSNRYQSYLEGVKYNVDSAIQTITKIYNTYTLFSTKLTQMYSTRLDNFAKAKAKEEAAKFTKEDLEKNFKTLLNYIQVSVKTAANFVYINDTHAKRKLENIEAEIKTLIAKIKEQSNLYEAYKAIVTSILLMRDSLKEVQGIIDKNGVWY

SEQ ID NO: 490 - protein, 324 aa, Borrelia burgdorferi s.s.
MGGFNMELFDENYYAKAVANIIGEVKDPIMYKWFSPDQIEDVDLQMGYQRTVKWDAFLNANPTTIANEVNTISTIGFSSEVVRLNYLKLQYKFRHLKQASEKFYTSDSYLGDINNNLLPFSQAYKLASSEIIKLINHFVLTGTVSIQKDGKNQKRLLPNMYGLLNMPHQVKEEVASGDKDKMDKIFEKIEAGLSKLELGDEFSTPMMVIVDPTTSLKLVKPYAAAQGAASSCEKWEDVLIQTIKAINNREDVYIETSNLLKHQILIYPLNPELIKFKPSKYMLPTPNEQVDKDSTDIAHSYIDFVLGGLLATRKTILQVHIKQS

SEQ ID NO: 491 - protein, 238 aa, Borrelia burgdorferi s.s.
MTIRENFMETVSTNIASVTQEQIYKEFIRLGMEQLIAQDLSKRYYHNELTYRDLENLEKQFDIKFDNLIFKIDSVEKNLQKDISNLDVKIDTVEKNLNAKIDGVEKNLNAKIDGVEKNLNAKIDSVEKNLNLKIDSLDTKIDTVEKNLQKDISNLDTKIDTVEKNLNVKIDTVKSELNTKIDNVEKNLQKDISNLDAKIDNVEKNLMSLTEMLKWVLGIMGAMSITMIAGLIFAFISK

SEQ ID NO: 492 - protein, 187 aa, Borrelia burgdorferi s.s.
MSDGITKIKEEFDKKVAEIKALMKNPQQDTGLLSNSVDFRDKNLIYSNSDGVFTSSKDKIENYPAKGYPYKRGVKLSFSADGTTELEVEAGGGDDLYGICTDIDEFTGMATVVPITNNFTGYLTFKKNGNGVNPGDKLHFNAQGELEKNGGNDKSVNAIALSKVHKLTEELSIVLASVFGNRALKGN

SEQ ID NO: 493 - protein, 431 aa, Borrelia burgdorferi s.s.
MSDKFTIKFKGILDHAATKKAIEQDISKMEKYLKPKKSSLGSTKDIVKNNLSDKKKELSRQSKFESLRERVEKYRLTQTKKLIKQGMGFEKARKEAFRRSLMSDRDKRHLEYKELAKESKAKSKMLAASQGKGLVAKIAIGSALRNIISNAMSKVGGGLLGFAKKAVEEDTKTKRTKLLNSAFFTDNERNMIMGNKDKNTKGILDGMKGFERDLEKEEFLNQASVFKGTLRDLDMLNETNLKNAVEFAAMLKSSGAMSSEDAVKAVNSVLGGDGSELFDLLKKSGVGDKYIEDAKMAWQSGAQVDLDSRITKMMEMFKDFKSFGLTKKVNNAESIQSNLASAEQTLQNLTTTVLDPILGLVNKITKYFEGFKFETHIINPIIDGIKSIFNLNYFFAKLKSMLPGWMGGDEGAALKKLQEEVQNQDNANNTP

SEQ ID NO: 494 - protein, 256 aa, Borrelia burgdorferi s.s.
MEQLMNKKMFIICAIFALIVSCKNYASGEDVKKSLEQDLKGKVKGFLDTKKEEFFGDFKKPEAKVQPKDEESMQADEPQEQGEDQVVQGVAEDQKLKEEIEQKIKELKDKIEKSDPKSVSLKTYSDYEKEIEELKEKLKDKEKFEKELEILEKALNEKIEKRKKELEESQKKFEELKGQVESAIGITDGERAKNQGKVGIEALRHARGLGFKNISSGNSTSDIAKEIIVSSLKKIEEELEELKKLEKESKDSNKKE

SEQ ID NO: 495 - protein, 179 aa, Borrelia burgdorferi s.s.
MRNLVHRTYDIESIKNEFLNIGFSEEAIDFVFLHNDNYNYEVLKEKIIDVEKNLQKDISSLDTKIDNVEKNLNVKIDNVEKNLNIKIDSVKNELNSKIDSLDTKIDNVEKTLQKDISSLNTKIDSVEKTLQKDIFSLDNKINVLKNELTASNRTIQVILIMGITLAPIIYSIFNKHFLN

SEQ ID NO: 496 - protein, 229 aa, Borrelia burgdorferi s.s.
MNKKMKMFIICAVFALMISCKNYASGENLKNSEQNLESSEQNVKKTEQEIKKQVEGFLEILETKDLSKLDEKDTKEIEKQIQELKNKIEKLDSKKTSIETYSEYEEKINKIKEKLKGKGLEDKFKELEESLAKKKGERKKALQEAKQKFEEYKKQVDTSTGKTQGDRSKNRGGVGVQAWQCANELGLGVSYSNGGSDNSNTDELANKVIDDSLKKIEEELKGIEEDKKE

SEQ ID NO: 497 - protein, 149 aa, Borrelia burgdorferi s.s.
MKIINILFCLFLLMLNGCNSNDNDTLKNNAQQTKSRQKRDLTQKEEVQQEKPKSKEELLREKLSDDQKTHLDWLKTALTKDGEFDKFLENDESKIKTVLNHIKSELDKCTGDNADNNKNTFKQTVQGALEGDIDKFTEQSDSTCGGGNS

SEQ ID NO: 498 - protein, 183 aa, Borrelia burgdorferi s.s.
MRILVGVFIIAALALLGCYLPDNQEQAVQTFFENSESIDMGSDEIVTEGIFSSLKLYASEHRLLVEIKKTLISLKDPNYRDVPPVRDYNEEYFNKFFLDLGSEQSKDLIKLFGRVKNEQNNKFKSEVYWLYSCISELYSPDIKYSGEEGSPEYDRFMPRPTAYQQYLKVKREIERNTINGKIL

SEQ ID NO: 499 - protein, 111 aa, Borrelia burgdorferi s.s.
MQNNTIGLGLNLLSSLTNIAKTDTNIDHNYINTFSKVIDFFYKTYISTLKSMETAESTKIFEEIQDILKYNIEIIEAISTDKSKRIITSLKATRNKIMKEYIKILKRGENA

SEQ ID NO: 500 - protein, 209 aa, Borrelia burgdorferi s.s.
MTIRENFMETVSTNIASVTQEQIYKEFIRLGMEQLIAQDLSKRYYHNELTYRDLENLEKQFDIKFDNLVSKIDTVEKNLNVKIDAVKSELNTKIDNVEKNLQKDISNLDTKIDNVEKNLQKDISNLDTKIDNVEKNLQKDISNLDTKIDNVEKNLNAKIDTVEKNLNAKIDNVEKNLMSLSEMLKWVLGIMGAMSITMIAGLIFAFISK

SEQ ID NO: 501 - protein, 92 aa, Borrelia burgdorferi s.s.
MSNLAYNALKIENIRLEFLNKGFSEEAIDFVLLQNDNYNFEVLKEKMNSLEQQIINVEKNFQKDIDSVNTKIDSVEKTLQKDISSLDNKIDI

SEQ ID NO: 502 - protein, 186 aa, Borrelia burgdorferi s.s.
MSIKNKMIITKRIDIKENMSKMESLEEIHKEEYLRLKDKLKTLTTDDIYNKIETAKILNAINQKKLYILDGYKNFYSFLADFKIAKSQAYKYIKIVSGVEKGIIDYNFIANNGIEKTIKQLESNNVIKKSRQNPIKPLRFQLKKQESYDFYKKNGKFTGFLLEELLESQTDLINKLLKKYKQLKGY

SEQ ID NO: 503 - protein, 180 aa, Borrelia burgdorferi s.s.
LDIKVNKRDLSDNENYIITDSVLNHYNSLKEKLKINSKKEIYCKLETLKILKEIKDNHYYRFDGYKSFEAFSKDYRLARAQVYNYLKIANAIEDGIIQEEFLIKNGILETLIVLRNKESKTIKKSKQNPIKPLRFQLKRQESYDFYKSNAKFTGFMLDKLFSDGKEIIKKLMKEYKELKG

SEQ ID NO: 504 - protein, 162 aa, Borrelia burgdorferi s.s.
MFTSSQVSFQILFQINDKFFYVLHLSNFADSFTKSLVQFVYWFLGFLFFKDSQMGTAEDSIPLYAAQLLIFVRLGAGKLLLYACPESRNSERGEPTFTFKLIPKEVSSKSIFVTFDNRPGICDFKESDFCRILKPTKLFALSNIDFLIFSPISICYPFGQPI

SEQ ID NO: 505 - protein, 184 aa, Borrelia burgdorferi s.s.
MRILVGVCIIAALALLGCYLPDNQEQAVQTFFENSESSDMGSDEIVTEGIFSSLKLYASEHRLLVEIKKTLISLKDPNYRDVVRPVSDYNEEYFNKFFLDLGSEQSKDLIKLFIMVKNEQNNNKFMRIVRWLYSCIEELYSLDIKYSGEGSHEYNRNMPRPTAYEQYLKVKRYDYNSPVSILPT

SEQ ID NO: 506 - protein, 181 aa, Borrelia burgdorferi s.s.
MQEQINEETVAISESLPKNDKELVTISSEEYERLVADAKKLPDMISREDFEKRLAEAESNFIKARKQAERQAEANAFKDSKILSNLEKACEQYEIAPPFANVLSVKDAKLAFLDAMKKKYNIKFKIDEEGDLDSQIDNISLLVQELTAYKQMVNARNRFTGQIINETKLQKYKDRFALGRA

SEQ ID NO: 507 - DNA, 1968 bp, Borrelia garinii
atgaattttaatcgatttttaatgttattcctttttaactttagtgttctattgggcagtgatactacagcattaggacattatcaaaaggctcatgaatattatttatctaaaaggtattatgatgctattgatgagcttgttgaggctataaaaattaatcccaattattatgaagcttataaatttattgcatcaatttattattctcttaagatatatactcaagcacaattttttatagaaaaagcttataaaatgtctaacgaagacattgagtataaaattctttatgcaaatatattattaaaaaataataaaattgatcaagcaaaaaaaatctattctgaggttttagttaaacagagaaataatattaatgctttagttggtcttgcttcgatttttgaacaaaatggcttatttatagctgccgctaattattatttatctattcttgattatagtcaaaataattatagtgcgtttgaacatcttattgatatttatcaaagactaggaatgcatgacaagattagacatttgataaataaagtcagagtaaattttttatcttttccagattttcataaaagagtagctgaattttatattagcattaataatttagggcttgccgaaaagtatgctttaaattatttagctttaattgaaagttcttataaagattttggagttgttggtgcatatcgattacttgcgcttgtttatcttcatgaatttaaatatgaggatgcaatagaatcattacagaaagctattttggttaataaagactctgatgaactttattacttattgggatattcttacttaaaatttgggaatattgaaaaggctattttaaatttagaacgagctaaaaatcttaaaaaagatttagaattttatagtattgctcttgaggagagtttttttgcatcgaattttagaaattttttgaaaaacaattccaatgctaaaatttctaagcattatgaaaatgaaggatttaaagcttttaaatctttggatttaaacaaagcattgtttaatgcaaaaaattctattgatatttggcctgataatgacagcgccaggtttttgctttcaaaaatttataagcttatgaatttagatattatgtcttatgagcagcttttttatttagttaaacagagaaattccactgattctagaattttggatttttatgatgttgtgtcttttgatgttagaaagtctttattttataaatatggatataaaagcattgctgattttaataaactttacgatgacagaacggtttatagaatggctatttttactcaaagtgaaaataaattttttggggcaaacgatttgatattaagatacgctgaaagggtgcttgagcgtaatttgaatatagaaatagttaactataattttgattacaataaaaatagagactatttgattaataatttttccgaaggattttcttattcaaggaataataatttggatttatttttaatttttgattttaaggcagatattttgaaaaatacagctactttattagttaatgttttttcgggaaaaacaggaattaaggttagttctttctcttatgatgtggggggtgttaattatttaagcaatgctttaaattccttttctaaagattttcatgattatttgcccaaaaaggggaagatccttcaaattaaaaatgaggatgctcttattaatcttggtcaagtaaacggtgttttaaagggtgatatttttttgattcttaaagaaggcgctttaaacggtgaaactagagattctaattttattgtttataaaagatcagatattttgggggagattttaattgaggatacaagtgattatatttccagaggtactataaaatcttccacctttttaaaggattatattcaagagggagccactgtgcttgtaaaaaga

SEQ ID NO: 508 - DNA, 714 bp, Borrelia garinii
atgaatctaatgttaataacttttaatgaatttaaaacaggaatttcactaaatgacaccagggcagagcatcttgttaaaatcttaaaattaaaagataacgacaaatttaaatttggcattcttggagaaagaaacatttaccattgcatttacaaaaaagataaaaaactatttttcaagaaaatctttaaaatagaagaatctaataaactcaaaaaattaaatgtactaattgggatgataagaccacttgtcgccagaagaatcataaaagaacttgctagtattggaatatacgaaataattttttttaacactgagcttactcaaaagtcgtatttaaattctaaaatctttaaaaataatgattacgaaaaacatttaatagccggagcaatgcaaggaggaacaacatatttgccaaaaataaaaattatgaaaaatttaaaggaaagccttaaatatattgaacaagaaaattttgaaataaaaatattgcttgaaaaagatagtaaaaaaaaattaattgatatagagcaaataaacaacgcaaccattattgtgggacccgagaggggatttacagaaaaagagaaacaattaataacgcaatataatttttccccttgcagcatatcatcaaacatcctaagaacagaaacagccatcattgctgcatctattattactgcatcaaaactaattaatgtg

SEQ ID NO: 509 - DNA, 945 bp, Borrelia garinii
atgaaaatattttttgtaagttcttcttttattgctttagaagtttttaaggagattttaaggcattatgaagtggtgggggttttaaccctgcctgataaacctaaaggcagaggacaaaagttaagtcaaaatgtaataaaggtggaggctattgctaaagatatcaaggtttttgatcccttgattcttgataacaatacattaaattcaattagagatttgaatccggatttaatgttggttttttcttatggcaagatatttaaaaaagaatttttagatatttttcgaatgggatgtattaatgttcatccttctcttttgcctaaatatagaggtgtttctcctattcaatctgcaattttaaatggtgattgtgttagcggtattactattcagagtatggctttagaaatggatagtggcaatattttggtgcaaaaaaaatttaaaataagatcttatgatacaagttatgatatttcaaagcttgtatcaagtcttagtccaagccttgttttagaagctttggaaaaaattagtaaggggtttttaggaattcctcaaaaatcgagcgaagctaccttttgttcttttttgaaaaaagaattgggctttatagactttaatttaagttcatttgaaattaaaaacagaattaatgcatgcaatccttggccgcttgtaagggctaagcttgattatagtgacattatttttcatcgtgctgatttttgggaaatagatttatataaagagagaaaagtaggagaaattgttgattttgatcccgaaagaggattatttgttaatactggtaaaggaattcttttcctcttagaagttcaaagacccggaagaagggttttagattttaagtctttttataatgggagtaggcagctaataggacgagtgttttcttcagtaggaggaatatat

SEQ ID NO: 510 - DNA, 1050 bp, Borrelia garinii
ttgaacaagccgaaggcatttggaggaagctttgacaaaaaagaaattcaagataaaatagaaaaatacgaaaaagaaatacaccagaaaaatttttggaatgatcctaaaagagcccaagaagttataaaagctcaaagtatcttgaaaaataaaattgatccgtgggaagagctaataaacaaaatcaaagatttaagcgatctttgtgaaattgttgaaaatgaaaaagatattaacagcttagaaatcgaatttaatgtacttgaaaaacagtacaaaaatttactcacaatttcttactttaaagaagagcttgacataaacagcgcttttttaactattcattctggtgctggaggcactgaagcatgtgactgggttgcaatgctttacagaatgtactcaagatatgctgagagaaaaaaatataaaacagaactgattgatttgcttgaagcagaaggtggaattaaatctattacaatagaaatcaaaggtgaatatgcttatggacttttaaaaagtgaagttggaatacatcgccttataagaatttctccgtttgatgctgctaaaaaaagacatacctcttttgcatcagtatttgttgaccctgttattgatgagaaaatagaaataataattaaaccagaagatataagaattgatacatatagagcatcgggagctggggggcaacacgtcaacaaaacatcctctgctgtaagaataactcacattgaaacaggaatagtaactcaatctcaaagcgaccgaagtcagcacaaaaacaaagatatggcaatgaaagttttaaaatcaagactttacgaatactataagaataaagaagataaaaaaaataaatccaagcaagaagtaaaaaaagaaatttcttggggcaaccaaataagatcttacgtatttcaaccttacaatttagtaaaagatcacagaacaaaatttgaaaattcaaacaccacttcggttatggacggcaatatagataatttcatagaagagtatttaaaatggaaaagtttaaac

SEQ ID NO: 511 - DNA, 1026 bp, Borrelia garinii
atgaaaaaaaaacaattaatacttcttctatttataacacaaattatttatgcaaaaagctattttgcatctgacacatttttcaataaataccaaaaattaaacgaaaaaccaaaaaaaggattttacattgagtatcatttgattgatgataccgaaaaactctacttatataaagaaacaaatttaataaaatataagacaattcaaataatagaaaacacaagaaaaatcacatattatgatacaaaagatacaaaaagaaaagaagaggtttacgataatttaaataataaaatacaagaaattgaatatgacagcaaaggaaaaattcttgaaacagcaaattacttttatgaaaacggcaacttaatatccaagaatttaaaaacaataaaccaaaaaccaaaattaatattttactctaaagatgaaaatggtaaattactaaaaataacaggatcaaatttccaaatttggaactatggaatcaatggcgatataaaatctacatattttgacatcaaaaaatcaacaacaaaggctataaaatatgatgacaaaaaaagaaatttaaacagtacaattattgttaataataaaataaaatctaaagaaaaaaaccaatatctagatgaacaaaaaatagtaaataccgttgaagaagcaaacacaaaaatcatatctacatatcaaagaaacaatctaattaaagaagaaacatataaaaataatgaacttataaaaataaatgattttcaatacaactcatctgatatgataatttttcaaaacactaaagaaaaggataaagaccaatataccaatactaaaattgaatacgaatataacaaagacaaccaattaaaaagcaaaaaaatttatgaaaacgatataatttatctaaaaaccgaataccacaatgataatgaatatgaagaagaaatatactacaataaaaaacccgctcttagagtaaagcataagaatggaaaaatcatcgaagaaaaaccaataggaacaaat

SEQ ID NO: 512 - DNA, 1251 bp, Borrelia garinii
atgatgcttctaaagctaacagaaattacaaaaattgcgtatataatttttaaaaattcaacaaataaaatagctttaataggttctggaatatcattaagtttagtaatgatcccactaattattgtctactatatgtctagcaatattatgacttctactattaataaatatattgaaagtgaaggtttttccattcaaatagaatacaataacacaaataaaaccaattacttaaaagacagattaagctcatttaaaaaaaaatataattacaaagatttaaattacttttttgagaaaagaacttacggaattattggaaataataaaaaacaaggcgtattaataagagcaatagaaaatgaattcatattggaaaacaaatcaataaaattaataaaaggtactaaaaatttaaaaaaggactccatactcattccaaatcaaataaaaaataaacttaatttaaatctcaatgaaaaaattgatattttgattccaaatgcaaaaaaccataaaatactgcccagaataaaaaagtttcatatctcaggaataattgaaaccggactaaaagatattgacaataacttagttttaatttctcttgaaaacgaaaatttaatgtcaaaaaagttttcaaaaagcataattggaattgaaacaaatttcaattcaataaaaaacaatgaaatcttgaaacagaatttagaaactgaatttcaagaattccaaataaaaacattttatgaactttacttaaataaatacaataatctagatataagtaaaaaacttttaatattcattatggctttgattataatatttgcaagcattaatatatcttcgtctatttcaatgcttatttttgaaaataaaaagaaaattgcaatactaaaatcaattggaatgaataatttaaacataaaaataatatttcttttgatatcgctcacattaagcactaccttttgcgggattggaataataattgggaactatttaacacttaaaatatcttatttaataaactttgttgataatgttttaaacttttttttaaaaatatttggagaagaaaattctgaaatattaaactcagaatattacgtatctgaatttcaaatagacttaagcctgagctttagcttaacacttcttagcttatatatgttaataaacattttaactacactggttccgctcaacattgtctcaaatctaaaagaaaaagaaatcttaaga

SEQ ID NO: 513 - DNA, 432 bp, Borrelia garinii
atggatataggtttaataggagttaattcagctttgacaatttcagcaataggttctgcgttgggtatgggagcagcaggtagtgctgctattggagcatggaagagatgttatatgcaaggaaagccagcaccatttttattgattgtttttgtttcagcaccattgactcaaataatatatggatatattttaatgaacactttatatgaggtgatgatgcagacaaatccatggttgttacttggagctggtattggtggtggttttgcgattgctgtttctggatttgctcaaggtaaagcggcagcaggcgcttgtgatgctttttctgagaccggaaaagggtttgctacatacctattagttttaggattaatagaatctgttgctctttttgtaatggtatttttaatgatatttaagtttgtt

SEQ ID NO: 514 - DNA, 1725 bp, Borrelia garinii
atgaagacaaaaggaaaagtcgttggagtgaatggtaacttagttactattgaggtggaaggttcagtttctatgaatgaagttttatttataaaaactgctggtagaaatttaaaagcagaaataattcgcgttaggggcaatgaagttgatgcacaagtttttgaattgacaaaagggatatctgttggagatgtagttgaatttacagacaagcttttaacagttgaattgggaccaggtcttttaacccaagtgtatgatgggcttcaaaatcctttgcctgaactggctattcaatgtggattttttttagaaaggggagtttatttaagacccttgaataaagataagaaatggaattttaaaaaaactgctaaagttggagatagtgttattgcaggagattttttaggctttgtaattgaaggaactgtccaccatcaaataatgattccattttataaaagagattcttataaaattgtagagattgtaaatgatggaaactattcgattgatgagcaaattgctgtaattgaagatgattctggcatgaagcatagtattacaatgtcttttcattggcctgttaaaattcctattactaattataaggaacgacttattcctagcgagcctatgttgactcaaactagaattatagatacattttttccagttgccaaaggaggaactttttgtattccaggtccttttggagctggaaaaacagttcttcagcaagttacaagtcgaaatgctgatgttgatatagtgattattgcagcttgtggtgaacgagcaggagaggtggtagaaactcttaaggagttccctgagttgatagatccaaaaactggtaaatctttgatggatagaacttgtattatttgtaatacaagttctatgccagttgcagctagagaagcctctgtttataccgctattactattggtgaatattataggcagatgggtcttgatattcttcttttagcagattcaacttcaagatgggctcaggctatgagagaaatgtctggtcgccttgaagaaattcctggcgaggaggcttttccagcttatcttgagtctgttattgcttccttttatgaaagggcaggcattgtagttcttaataatggcgatattggatctgtaacagttggtggttctgtaagtcctgctggtggtaattttgaagagccagttactcaagcaaccttgaaggttgtaggagcattccatggacttacaagagaaaggtctgatgctaggaaatttccagctattagccctcttgaatcttggagtaaatataaaggtgttattgattctaaaaaggcagaatatgcaagatcttttttagtaaaaggtaacgaaattaatcaaatgatgaaagttgttggggaagagggtataagtagtgaagattttttaatttatttaaaatctgaactgcttgattcgtgttatttgcaacaaaattcatttgattctgttgatgctgctgttagttcagagcgtcaaaattatatgtttgatatagtttataacattcttaaaaccaactttgagttttctgataagcttcaagcaagagattttatgaatgaattaaggcaaaatcttttagacatgaatctttcttcttttaaagattataaatttaataaattggagcaggctttgagtgaattagtaaatttaaaaaaggtaatt

SEQ ID NO: 515 - DNA, 1191 bp, Borrelia garinii
atgaaaaaggtagctattattgatggacttagaatgcccaataccaagtttggaggttcttttaagggcttggatattattgatgaatcttcaaaagttgttaaagctttacttaaaagaaataatttatgcgaagtggatgaggtcattgttgggaatgtaatatcttcaggacttggccaaaatattgcaaggcaaattgctttaaagtctagtttgggcgataatgtgcctgcatttagcgtcaataaagtttgtggctctggtcttaaagctttggagcttgcatttaattctattgttcttggaaacaatgatattgttttagctggagggatggaagatctaaccaattctccttatttattgcccagaaaggttagatttgacggtcttaaatttggtaattttggaattgaagattcaattcaaaaagatgccttaatagattctctaaattttatttctatgggacttacggcggaaaatctttcagaaaaatataaaataacaagagagatgcaagatgaatttgcatataattctcatgtaaaggcattaaaggcaagagaacttggatattttgaagatgaaattcatcctttgactattcttgataagaagactaattctagtaggattgtctcaagtgatgaggaaataagagataatttaactctaaataagctagcatctcttaatcctgtttttaaagaatcaggcacagtaactgccggaaattcttctagtttaaatgatggggcttgttttttaattttagcaagtgaggaaagagtaaaaagcttaggggtaatgccattggcttatattggggggtttgaaagcgtagggcttagtccgctttatatgggttttggagcttatatggccattgaaggcattattagtaaattaagtttaaaccctagcgaaatagacttgattgaggtgaatgaagcatttgcagctcaagcattaagcattgaaaaggccttgtttaaaaaatacaatatagctagcgatattatcaatgtaaatggtggtgctattgctttggggcatccatttgcggttagtggttcaagaattttattaacacttgctcgttctatgaaaatgaagaataaaacaaaaggaatagcatctgtttgtgttggcggtggacaaggaatttctagttttttgtataga

SEQ ID NO: 516 - DNA, 1653 bp, Borrelia garinii
atggaaaatcaaaaagatttacaagaaaattatttgaaagtacttgaaagagtagaacttggaagtcgtgtttctggaacggttattaacattatgaaggattatgttctagtagatattggttataaatcggaaggctttattaaaattgaagaatttgaaaatgtgcccaagattggcgataaacttgaggcaatcgttgtaagaataggcggagaattgggcctgattttaagtgttgaaaagcttgattctttaaattttcaagataaagtagatgaatatattcaaaataaaaaagtaataaaaggtaaagttttggctgagcttgcaaatggctataagattcaaattaatgaaaatgtttctggctttatgcctttttatttaagctccaaatctaaggatgaaaaattaaaaagaggtcttattgttgaattttatattcttgaagcaagcgaatcggacggcttgagacttattcttgatagacgcactttagaaagagaaagagatcttgccaagagaatagagttagtaagttcttataatgaagaagatgtggttgatggtgtggttgatcgcattacagaatatggtgcaattgtaaaaattaaaaattttgttacaggaattttgcacaaaagaaatattgcctttaatcaagttgaaaatattgaagattttgttagagttggcgataaattaaagttgaaaattattaagataaatctgcaaacaggtaaaatggaactatctcttaaggccctaaaagcaaatccttgggattctgtagatattaaatataaaattgatagcattgtaaaagggaaggttgtaaaaattttaccctttggagctgttattgagcttgatagcgaattgtcagggtttttgcatataagtaatttttcttggataagagtaataaagagtcctcaagaattaataaaacttggccagatggtagaagttaagattttagaggtagataaagaaaatcaaaaaatatcgttgggtatcaagcagatcaatgagaatccttgggagaggttaactgagaaatatcctattggaaaggttattcaaggggttgttactaatattacaaaaacaggtgcttttgtaaatattgaagaaggtatagatgcttatgtgagtaagtttgatatttcttggctcgaagagattgatcctgaagaatatttcaagataggcgatttagtgaatggcaaagtgcttgaagttgacagacgaaagaggaatgttagactaggaattaagcagctagaagagagcccttgggaagatttttctaaaagttataaaaaaggtgatgctattgaggttgagattgtagagaaaaagtcaaaaggctttcaagttagagtttataataaaataatgggatttattagtaaaattcagctaggagatacaaaagaatccagtttggaaacttttgaaaaattaaacattggagataagcttaaagtggtaataacaagtattgattctaaagacagatcagtacttctttcttatagggagtatgaaaatcaaaaatcaagagaagagatttcttcttatttatttaagggcaacgatgaggaatcttataagccatttgaaagtttgttaaagagggatgaa

SEQ ID NO: 517 - DNA, 1887 bp, Borrelia garinii
atgaccaaaaaaatacttaacaacaaatatcgaataaagacaatattaataatatctttgggtataactttgctaactatttacaaatattttacattaatggtcttaaataacagcccagacaacattatatctttaaagtcaaatgatattgtaagaagaggaacaatttatgatagaaatggcaaaccaatagcattctcttcaaagtcctactcaattggaacaaaccctcaaaaaatagaaaatattgtaaatacatctgaaactcttggcgcaatactccaaattgattcaagaattttaaaggaaaagctttcttccaataaagggtttttatatataaaaagaaaaataaaaagagaagagtcagatttaatcaaaagaattcaagctgaaggcaggctctcaaacattgctttatatcctgattacacaagaatttatccttttagacatgtcacaagcaatattactggatttgtgggaacagataatcttggccttgagggcattgaattttctctaaatagtatcttagtgaaagataaaaccaagcaacaatttttaaatgaagaattagaaacaaacaacatctacttaacaatagacatgaatatacaacaaggtgttagcaaaatagctaaaaaatactttaaagaaaataatcctgaaagtttaattactttagtaatggactcccaaaatggagaaatattatctatggttcaattccctcaatatgatgcaaacttttattctgaatatcctgaagaaatacgaaaaaacctttcttcatcattaacctatgagcctggaagcattaataaaatttttacagttgcaataatattagaaagtggaaaattaaatttagaagaaaaatttttagacaatggaatatatcaaaaacaatttccatcaggagagaaaattacaatcaaaaccttaaatcctccctataaatacatcgactctacagagattttaatttattcatcaaatgtaggaatagcttacattactgacaaagttagcaatgaatacttttacaaaaaacttttagattttggatttggaaaaaaagttggatttccatttcccggggaaacaaaagggctcttaaatcattattcaaaatggtcaggaagaagtaaagctacgattggatttggacaagaaataggagtgtcagcagttcaaatattacaagctgcaagcatactaggcaacaatggaataatgttgaaacctagaataataaaaaaaataagtaacgataaagaagaaagtattaaagagtttgataaagaagaaataaaaagagcaatatccaagagttcagcacaaaaagttttaaaaatgatgagagaagttgtaaataaaggtggaattccaaaccttaaaattaaaaatcttgacatttctgcaaaaagcgggacatctcaggccattgatagaaaaaccggaaaatactcagaagaagactatacatcctccatcttagcaatataccccacagaacaaccaaaatatattatttatattgtatacagatatccaaaaaaaataatatatggaacaagaatagcagctccaatggcaaaagaaataatagaatttattgaatatcaacaaaacacaagcgcatataaaaaaatcaaaatgccatcaaaaatcaagattcctaaaactgccgccaattataaaaacaaggcatacttgccaaattttataaatctttccaaaagagaagcaatagacatactaaaatactataaaaacaccataaaaatcaaaataaatggcgctggatttgtctataagcaaagcatacctcccaatacaaaattagaagacatagtagagcttgaactgtatttaaaa

SEQ ID NO: 518 - DNA, 1008 bp, Borrelia garinii
atgattataaatcataatacatcagctattaatgcttcaagaaataatagtattaatgctgctaatcttagtaaaactcaagagaagctttctagtggttacagaattaatagagcttctgatgatgctgctggtatgggggtttctgggaagattaatgctcaaataagaggtttatcacaagcttctagaaacacttcaaaagctattaattttattcagacaacagagggaaatttgaatgaagtagaaaaagttttagtaagaatgaaagaattagcagttcaatcaggtaacggtacatattcagacgcagacagaggttctatacaaattgaaatagagcaacttacagacgaaattaatagaattgctgatcaagctcaatataaccaaatgcacatgttatcaaacaaatctgcttcccagaatgtaagaacagctgaagaacttggaatgcaacctgcaaaaatcaacacaccagcgtcactttcaggatctcaagcttcttggaccttaagagttcatgtaggagcaaatcaagatgaagcgattgctgtaaatatttatgctgctaatgttgcaaatctattctctggcgaaggatctcaggctgctcagactgcacctgttcaagaaggtgctcaacaagaaggagctcaacagccagcacctgctacagcgccttctcagggtggagttaattctcctgttaatgttacaactacagttgacgctaatacatctcttgctaaaatagaaaatgctattagaatgataagtgatcaaagagcaaatttaggtgctttccaaaatagacttgagtctataaaggatagtactgagtatgctattgaaaacctaaaagcatcttatgctcaaataaaagatgctacaatgacagatgaggttgtagcatctacaactaatagtattttgacacaatctgcaatggcaatgattgcgcaagctaatcaagttccccaatatgttttgtcattacttaga

SEQ ID NO: 519 - DNA, 1995 bp, Borrelia garinii
atggcatcaggattttttgttcctggacttgagagtaaatataatactaaagaaattcgtgaatctatgcttaagcccgatagagctaaaattgattcttcttttaagaaacttgaatctttagaacaagaaaaaagcgcttggcagttaattaatagaaaaatctctgctttaaattctcttgcaaaagaaattacgtcacttaacagtccttttaatctaatgtcagggaattctagtaatagcgaagttttaaccttgtctactcggtatggatccaagaatgagactcataaattaattgttgatcaaatagcgtcagctgatgtgtttttatcttcaaattttgatcctaaaaaagttacaatcccagaaggagattatatatttttagttgggaagaaggaaattaatgtaaaaagtaatggcaacattgatttgcttgttaaggatattaataacaagggaaagggctttttatctgcaaaaatagtaaaaagtgataaaaatgggaatagtcgttttattttgcagtccttaaaggaaggcaaagagaataaacttgttatcaaaggggaaggattgtcttttgctaagcaaattggcattttaagtgaacttaaaactaattttaatcctaccttttcagatattgttgtaaatcaatctagtagtaataatagacttgtttttgaaaacaatagccttgttttaaatccgctttcagaggtgtcgattgaaattcctgaagatattgaaattacatctaggagtaaaattaaatttaaagtcaagtattttgatacaggtttagaagagcctgacagtaagattatttttaatcccggagaagctacatttaaggatgcaaaagttgacagtgaatatagtgtagttgatcttggatctgatttaaaaactcctttggaaaaaaaatatattcaaatgaatatggttaaaatatgcaatatagagggttctctagagcttccttcaataaatatttcaaataactttgaagaagttgaagctgatgttggagctttttctaatttacaagaaataaatattgaaattacagcaaataataaagtaattgtgattagcaatgtcgaagtttttgatcccaaaaatagagatggccatttaccaataaatgctaaaagttttgccgagaatgcaaaaattatatttgatggagtacatgttgagagagatttaaatgttattaatgatttaattccaaatgtgacattaagtttaaaaaaagcttcaagtgatatggttgaggctaaagttgaacctgattacgagggaattaagagagtccttttagattttattggtgcttataatgaggttattgctgagattaatattgtaagttccaatgaagatcaacttggaaatcaaaagtccaatatagttgaagagctgacttatcttagtgaatctcaaaaagaagaggcttataaaaatttaggtgttctaaggtctgaatttttattgaaaaatcttaaatctagactagaatcaataatttttaagccttatgttactagtgatcctaatttttcaataattaatcagatgggagtgtttaccaactctatttcttcttctgggggactttccagatatttgagacttgatgagaaaaagtttgatgaatcgattcgcaacaacattgataatgttagagaactttttttatttgaccttaatggcgacagagtctatgataatgggattgccaaaatgctaggagattgtttagcgcctcttgtgacttctggaggagttatttataataaaataaaaaattacgatcttaaaattgttaatcaaaaaaataaagttgaagattataaaaaaaagtacgatgatagagagagaaaagtagaaggcgagcttaatatcttagattttaccgttaagcgaatgaaagatcaggaaaatacattaaaggcttttgattttaatcaaagaaataga

SEQ ID NO: 520 - DNA, 1203 bp, Borrelia garinii
atgccaaatttttgcttattcaactcaaaatccgttttaactggaaacgacaaactagataattcagcggtccttattaaagataatgaaatttttgatattgtaacatctgatagacttaaaaaaatggatctcagggaatatcaaatgattgatgcaaaatgcaactatataactcctggactttacgacagccatattcatggatttcacggttatgggacagaccagtgctcaacagaatcaatacttaaaatgtcagagcatttggcacaatacggtgtcgtaggatttttaccaactctttatccaagaccaatagatgaaatgattcaaacaataaaagcttgtacagcagcaattggcaaggaaaagggtgctaaaattttaggacttcaccttgaagggccatttttctcccctgaaaaaagaggcgcacaccctgtttcttatcttcacgaaccgagcattaaagttatgcaaaaactaatagatgcagctggtggaatatttacaggatcaaacggccaaaaaaaaacacatataagcacaatgactgttgctcccgagcttaaaggaatgagagaacttgcaatgttttgccttgaaaacaatataaaccttcaagcaggacacacaaacgcaacatatgaaaatatgatcgaaggatttcaagttggaatacttcatacgacccattttttcaacgcaatgtcaaaacttgaccacagaaatccaaatgcaataggagcagtattaatacatggtgatgtttcttgtgaaattattgcagatggtcatcatatacacccaaaattagttttaatgatgagaaagcttaaagatataagtaaaatagtccttgtaactgacggacttactccaaattttcaaacttctggaaaactaattgcaaacggagatgaagtttatattgcagaggatggcttattccacagtgtgaaaagcaacacaatagctggatcaacgcttacaatgatacaaggtcttaaaaatttagtagaattcggctacagtttaagtgatgctgttcaagcaagctcttacaatccaacaagaattcttaatattgataaaaagggattaatatgccatggatatgatgcaaacatcaatgtcttagataaagatttcaatttaaaattaacaatgatagaatctaaaataatttttaacaatctc

SEQ ID NO: 521 - DNA, 1881 bp, Borrelia garinii
gtggattcaacattctcaggaatagaaattggcaaaagaagtttatttgcacataaagatgctatgaatacagttggtcataatttatctaatgctacaaaacctggatattcaaggcaaagagtaacaatgaaaaccgaaattcctctttatgctccgcaactaaacagagctaaaaagcaaggacaattgggtcagggaatagtggttcaatctatagacagagtaaaagatgaactgcttaatacaagaatcgttgaagaatcacaccgactagggtactggacttcgcaagacaaatttatatcaatgttagaagatgtttataatgagcctgaagatcaatcaataagaaaaagattaaatgatttttgggaaagttggcaagatctagcaaatcaaccacaaggtttagcagaaagaaaaataattctagaaagaggcaagtctttttgcgaattaataagaagtagattccattcactagaaagaatttacataatggcaaacgatgaaataaaaattacaacagatgaggcaaacaattacattaaaaacattgcaaatcttaataaacaaatttcaaaatctcaagcaatgaaagacaatccaaatgacttaatggatgcaagagatttaatggttgaaaaattgggcaatttaataagtgtatcaattgaaaacaaacaggatcccaatgaatttttaattcactcagaaggaagacaccttgtgcaaggttcaattgctaatgagtttaaactagaagctacaaacggacctaccagaaccaaatggaacattttttgggcaaataatgataaagctaaccttgaaacgggaaagcttggatctttgcttaacataagagatgaagagattaaaaatgaaatcaatgaactaaataatttagctgccaacattatagagcttgttaacgaaatacatgaaacaggacatgggatggacaaaaaaagtggaagaagctttttttctcaagagctaaaactaactgatgagcgcggtcgatatgatactaacggaaatggccaatttgactccgttcatattttcaaaattaatagcacaaatgaaatattcccagaagagaaattaggattttatggaattcttaaatttgaggctactaatagcaatgagattatagaaataccttacaatgctccagatacagttcaagatctgataactagaataaacaattcaaatgcacaagttacagcaagaattaactcagaaggtaagtttgaaatcaaagcagttaaagaacaagaaaatgaaaacataacatttagaattaaacatatagaagattctggattatttcttacaaaatatacaggaatattaaatgaatctggacctgagggagcttatgattatagaaatattgacacaatagacaaattaacccctaagtccacttattcaatctcgcctctaaaaaatcctgcggcatggataaaagttgcagacataatagacttagatccttcaaaaatagcagcgggaattaatagcccaacaaatgaaatatctattggagataaccaagcagcattgagaatctcctcttttggaaattctcagattatgattggtaaaaatttaacactaaatgattactttgcaaatacagcatcaaatatagcaataaaaggacaaatatcagaaatcacaaaagaaagccaatctcaaatattaaaagatttaacagatctaagaatgtctatttctggagtaaataaagatgaagaacttgcaaacatgatcgaatttcaacaagcctttattgcagcaagtaaatttatcactgtttctgccgaactaatagacacaataataaataaaatgggagta

SEQ ID NO: 522 - DNA, 738 bp, Borrelia garinii
atgtctagcccaaaaatacttaccataatagtgctcttggcaattttagcacaaggatgcaaagaaccttccattattgaaaaacaatttaattatacaatagttttttcagatgcaaccgaatatttttttcaaattcaaaaaactccattcataaaaaacaaaatactatttataaatgacaaaagtttagaaattataaaagataagcttaaaacaataaaaaaaatactattaacccataaatccaataatgaaatattaaataacgaaattttaaaagagaaaatttttaatctatcaaaaataaaattttctctaaaaaagtctattgattttctgcttaacggaaaatcaatagacttccaaaaaacattattatttagagataaatctctaaataacgaagaccttgaatacttagaaaaaaaaggtaaagaaaaaaacgttaatattaccctaataaacgagaaaaacatatcctatataaaaacatttattactccccaaataaaaacaataatattattttcttttagagataataatattattttaaaaaagatatcaaattcgccttttttcaaaaatatacaatttgtattaattggcaatacaagaaaagacttaaaaattattaagttaaaatatgtaatcactcttaaagaatctgatttgatggaaatagtaaaagacattgaaacagattttcaatatgaatttaacatctataaacaa

SEQ ID NO: 523 - DNA, 1083 bp, Borrelia garinii
gtgaaaaaaaatcttatgttaatatttggtggagtttcttttgaacatgaaatttcttgcaaatctgcttatagcatttatttagcccttttggatctaaataaatacaatatttatcctgtttatattgataagtgtacaggtatttggtatttattagattctgtttcagatcctccaaagcttatcgatatagatgttttacctattgtaagcttattgcctggtattggaattttttcaaataacaaaaatcttgatattgatgttgtttttcctgttgttcatggaagaaccggtgaggatggtgctattcaaggggttttaaaagttatggacattccttgtattggtgctggcattatagggagcgctatttctagcaataagtatttttgcaaacttttgcttaaaagttttaatatccctttagtgccttttattggatttaggcaatatgattattttttagataaagaggaggtaaaaagaaatgtaagggaggctttaggctatcctgttattgttaagcctgcagtattagggtcttcaattggaataaatgtagcttacagtgaaaatcagattgaattttttattgaggaagctttaaagtatgaccttactattttaatagagaaatttattgaagctagagagatcgaatgttctattattgggaatgaaaagataaaaatattttctcctggggaagttattgttcaagattttatattttatgactatgatgctaaatattctgttattcctggaaattctattatttttaatattcctgcacagcttgagacaaatcagttgttaagcattaaggaatatgcttttcttgtttataagaatttagaactcaggggtatggcaagagttgatttttttgttgaaaaaaaatcaggaaaaatttatcttaatgaaataaatactattccgggatttaccgatatatctatgtttgctaaaatgtgtagtcatgatggtcttcagtttaaagacttggtggataatttaattaattatgcttttcaaagttacattaatagaaaaaaaagaattaattttgaagat

SEQ ID NO: 524 - DNA, 2718 bp, Borrelia garinii
atgaataaaaaacgtacaaatttttcggtattattgcttttaattttcttacttattttatcatttggaggctttggttactatatatatcaaagcaaattaaatgacaaaaatcgagaaataatgctaaacgaagttaaaaatagcataatagatcgaaactataaaaaagcatattctgttgcaaaacttctgcaagacaaatatccaaaaaatgaagacattgcaatgcttacaaacacactagcagaaattgccaacagcagtccttttgaatcaaacgaattacaaagagattctgcaaatcaaatcctcgataagattaaaggtcaagaaaatgcaaaaacaaatataaacgaaaattttgatatcgcatttaataatagatatattaaagacagcgcaataacagaaaactacgctgacagaaacgatgacattggcattgaagatgaagacatatctgaatttaaaaaaagcaaaatcccagaaaaagtaaaccaaaatgcaaaacaaaaagaagaagatcaggcaatacaatctccaaatcccaaattaaacgttaatgatcaaaaaaattcatttaatttggaaaaactaaaaaaaaaattaagcgaaaaatcaaatagtgaaaatattttaaaaaaccctcaaaatatagaaaatgataagcaaagctcaaatttctccaaagaaaaaaattcagagcatattttaagaaacccagacaatagtaaatattcaaaaaatgataatgccacatttttaaaagatgttcctttaaattctaaaaaagaaagtgatttttctctgcccagtcaaacaataataggaaaaattcatagaccatatagctacttaataaaaaaagagctctatgaaatattagacgatattaataccggtagagtcgcacttggaaaaaacagattaaaaaaattaattaaaaaagggttaagcaataaatttcaaaaagtaaatgagctgattgaaagtttaaagaataaagacgcctccaatttactattaaccttaataaaaaaagatattgagccaaatttaatcaatgtaccaaatataccaaaagatccttacaaaaaagacatttttcaattaaataaagaagacaagaaaacccaacaatcggaagaccttaaatctaagatctattcaataaaacctactgatcttgaaaacccaaaaaacaggcaacaagccattaaagatctaaacgaattcttaaaaataaatcctaatgacacttatgcctctaaaactttggctcaagctaataaaatacagcaatcagaaaaccttaaatctaagatctattcaataaaacctactgatcttgaaaacccaaaaaacaggcaacaagccattaaagatctaaacgaattcttgaaaataaatcctaatgacacttacgcctctaaaactttggctcaagctaataaaatacagcaatcagaaaaccttaaatctaagatctattcaataaaacctactgatcttgaaaacccaaaaaacaggcaacaagccattaaagatctaaacgaattcttgaaaataaatcctaatgacacttacgcctataaaactttggctcaaacttatgaaaacaatggagatttactaaaagcagaaaatgtatatgaaaaaattgctaagctcacaaatgcccaagaagattactataaacttggaatcattagattcaagctcaaaaaatatgaacactcaatagggtcatttgatcaaacaataaggctcgacccaaagcataaaaaagcacataataacaaaggaatagctttaatgatgctaaataaaaacaaaaaagcagtagaatcttttgagaaagcaatacaaattgataaaaattatgatactgcctactaccaaaaaggaatagcagaagaaaaaaatggcgacatgcaacaagcatttacaagttttaaaaatgcctacaatatcgacaaaaaactcaattacgcattaaaagctggaatagtatcaaacaacttaggcaacttcaaaaaaagtgaagagtatttaagtttttttaatgacaatgcaaaaaaacctaacgaaattgctatttacaacctatcaatagcaaaatttgaaaacaataaacttgaagaatctcttgaaataataaacaaggccctcaatttaaatccagaaaaaagcgaatatttatatttaaaagcatctataaatcttaaaaacgaaaattaccaaaatgctatatcactttacagctcagtaattgaaaaaaaccctgaaaatacttcagcctacataaacctagcaaaagcatatgaaaaattggggaataaggctcaagcaatctcaactcttgaaaagataataaacaaaaacaataaattggccttaaacaatcttggaatactttacaaaaaacaaaaaaattatcaaaaagcaattgaaatttttgaaaaagcaataaaaaattcagatattgaagcaaaatataatcttgcaaccactctaattgaaattaatgataacataagagctaaagaccttctaaaggaatatacaaaattaaaaccaaacaatccagaagccttacatgcactaggaataatagaatataatgaaaataataatgatcaaatattaagagaacttgtcaaaaaatttccaaattacaaaaaaaatgaaaatattagaaaaataataggaata

SEQ ID NO: 525 - DNA, 834 bp, Borrelia garinii
atgaaaaaatttgttatcttaatttttatgttatcagtaagtttattatgcaactgtaaaaatcaagacaatgaaaaaattgtatcaattgggggatctacaactgtaagtccgatactagacgaaatgattttaaaatataataaaataaataatactaaagtaacatacgatgcacaaggaagtagtgttggcataaatgggctatttaacaaaatatataaaatagcaatatcatcaagggatttaacaaaagaggaaattgaacaaggagcaaaagaaactgtatttgcttatgatgctttaatttttatcacaagccctgaaataaaaattacaaacattacagaagaaaatctagctaaaatactaaatggaaaaattcaaaattggaaacaagtgggaggccctgatgctaaaatcaactttattaatcgagactcttcctctggttcttattcgtctataaaagatctacttcttaataaaatatttaaaactcacgaagaatctcaatttagacaagacggaatagtggtaaaatctaatggagaagtaattgaaaaaacaagccttactccatactcaatagggtatataggtcttggatatgcgaaaaattcaatagaaaagggcttaaatatactttctgtcaacagcacataccctacaaaagaaacaataaataataataaatacaccattaaaaggaatttaataatagttacaaataacaaatacgaggataaaagcataactcaatttattgattttatgacaagctcaaccggacaagatatcgttgaagaacaaggttttttagggataaaaaca

SEQ ID NO: 526 - DNA, 1215 bp, Borrelia garinii
atgcaggatcctaggctgtccaagtataaaaatactaaaaatttaagtaaaaaaactgttgaagaaattgatactttgagtttaaataaaaacttttccgattcagagattcaaggttctatgcttagatcttggataagtcttattaagggtaataaaaataaagcacctgttgagtctaaatccgataatattaataatttaaagccagggtttattcgcaaagagagtaaggttataaagattgcaaaatattttttggctattgggcttgaaaaatctgcaaagattatgtctgagcttgatgattcggacataatcttaattaccagagaaatttcaaagattagctatattgctccagaagaaaaagatcacattattaaagaatttgaagagttgataagaaatgaaaaaagatatgttaaggttgatgataactttgcttatgaattattaaataaaactttaggaaaatctaaagcaaaattaatttataaaaaagttactggcaatgatatttttattccttttgattatttatctcaaattgagcatgaacaactttgggcattagttaaagatgagaatattaaaacgcttgtcatattgtataattatttaaataaagatcaaaaaaagtatgttttttcaatgctagaagaagaaggtagaagagagtttgtaaaagatcttgctaaaccaaggcaattgagcatggagacaatagaggcaatttcgaataagcttaaggacagatttaagatgcaagggaggcttaagacagataaacttgatggatctaagatacttgttgatattttaagctatatggattctaatgaagagaaaagtctgcttaataagattaatatgcgagatttaaatcctgttgtggatagtgaaattcgagaaaaaatatttgatatcaatgtaatattgagaatcatggataatgatttgcataatattttaagagagtttacagataaagagattgcaattattattaaagataaaaccgatgaggttagagataaaatgctttcaaatgtttcaaaaaggcgtaaagaaattattttagacgaagaagcttttttagggaaaataagtaaaaaggatttaaaagctatgacatcatcttttgttaattatattaaaagtttaactttaaaaggtgatttagtaatatatagaaaaaatgaggaatttatt

SEQ ID NO: 527 - DNA, 2004 bp, Borrelia garinii
atgttaatttttggttttattggtttgttttttttaaatctttttagtttaaatgctcaaggaatagttaccaataaagatgctcaagaagagtttaaatgggctcttaattcctataataatggaatttatgatgatgctcttttgtcttttaaaaaaattttaagctttgatcctaataaccttgattatcatttttggactggtaatgtttattatagacttggttatgttgaagaggctttaatggaatggagaaatttaaaagatcaaggttataaggtcccttatcttagacatttgatttctactattgagcaaaggagaggtattttttcaaattacgaacttaattttaaaaaacttgtaaaagttgcttcccttgataattctatttataaaagaccacacgggtatcagattacatctttgagggctgataagtatggtggatattatgctgctaactttgtaggtaatgaaatattgtattttgatgttaataataatgttaatgctttagttaaagatggatttagttatgtaaaatcaccttatgatgttgttgaagctaataatttgctttatgtgactctttattcaagtgatgaaattggcgtttacgacaaagttcttggcgttaaaaagagatctattgggaaaaaaggcacaaaagatggcgaattgcttgctcctcagtatatggctattgataagagaaactatatttatgtaagcgagtggggtaataaaagagtgagtaaatttggacttgagggtgattttattctgcattttggttataaaacttcgggttataatgggcttctaggtcctacaggtattacttacttaaatgaaaacatttatgttgcagattctttgagaaacactattgaagtttttgatactagtggtaatcatttgtattcaatttttacttctattgaaggaatagagggccttagtagtgattctgctggcaataatgttataatatcttcaaaatatggtgtttataaatacaatattgctaaaaaaacaattacaaaaattttaaaagcagacaaagtaaattctaaaatttcttcatctattttggatgccaacaatcagatgattgtctcagattttaataatgctaaggtttcagtttacaagagtgattcaagcctttatgatagtttaaatgttgatgttagaagaatagttagacttggtgggcctaaaatttacgttgagcttaatgttagcagtaaaagcggattaccagttgttggacttaaaagtgaaaatttttcaattgcaaatgaaaattattacattgtaaatcccaaagtagtttataatgtaaatgcttcaaaagacattaatatagcggttgtttttgataaatcttcttatatgaaaaattatgatctagatcaaatagtaggtctaaatgctttaatagaatcgtcaaaaaataaaaactttagttttataaatgcaacaagtgtgcccattatagataatattgaaagtttgacaagcagcattaaaaacacaagttctcttggtccttatagtacagatactgtaaaaacagatgttagtttgaagctagcgggttccgggcttatgtcaaaaagctcaagaagggcagtagtttattttagtggcggtgttttaaatcataaagcttttgaaaagtactctttagatacaatagtaagctattataaaaataatgatataaggttttacttgatattatttggcaacgatcctgttaacagtaagcttgagtatttagttaatgaaacaggtggagctataattcctttttcatcttatgaaggagtatccaaggtttatgatttaattttagaacaaaaaacaggtacttatttgctagaatattattatccaggcccccaagagcctaataaatattttaatttatctgttgaagcaaatataaatcaacaaacaggaagaggagagtttgcatattttattaat

SEQ ID NO: 528 - DNA, 768 bp, Borrelia garinii
atggggagattatttcttctgtattttttatgctcttttgtttttttaaatttgtttgctcaagggagttcttcttatactgataaacaaaaagagcttgctattttttattatgaggttggtcaaaggtatataaatgttggcaaaattaaaaagggaaagctatttcaagcaaaagctttaaagttttatccagatttgaaaaagggagttgatattaagcttgtagttaaagagcttgatactaggattaaagatgacaattccaaggttgttatgcttgagaatgttaagcttgaggagataccaggaatagtgcacgaaaaaatagaaatcaatgattttacaaatgctcctaaaataggatatcttgctgaaagagaaagaagtaaaaatcaagataaaattattaaatttcaatttggaaagtttacaagagctttaatttctcagaaatttgatttgtttgactctgttgttgcggataaagttgatgttatgggtcaatttgaatcaaaaggtgattttatatcagctttatcaagagcttcatctaaggttgatgcagatgagttagagtatttatcagttgatgattattatgatttaaagtctttgaaaatttcaaaatccaatgatactgcttttgccgttaatgtgaataccaaaaaaaatgatgttactaaaaattttccattttggaaagaacatcagactttgatttttaccaaagaggatgataataattggtttttgtcttccataaag

SEQ ID NO: 529 - DNA, 1326 bp, Borrelia garinii
atgatgaggtctttatattctggtgtttctgggcttcagaatcatcaaacaagaatggatgttgttggtaataacatcgcgaatgtaaatacaattggttttaaaaagggaagagtaaattttcaggatatgatatcgcagtctatttctggagcttctcgtcctactgattctcgtggcggtactaatcctaagcaagttggattaggcatgaatgttgctacaattgacactattcacactcaaggggcttttcaaagtactcaaaaagcatctgatcttggggttagtggtaatggattttttattttaaaagaaggtaaaaatttgttttatacaagagccggtgcttttgatgtggactctgatcgacaccttgtaaatcctgcaaatggaatgcgaattcaaggctggatggcaagagatttagaaggtgaaaaggttatccatacagcctctgatattgaggatttgattattccgattggagataaagagggagcaaaatctactaaaaacattacttttgcctgtaatcttgataagagattgcccataattgaagaaggtgcaagttcggcagatattgcacgtggaacttgggttgttaataagtcattatatgacagttttggaaatgttagtgttcttgagcttacggttgtaaaagatctaaatactcctaatttatggaatgcaccagtactaataaatggtgagcaaaattcaaattttacaattggatttgacaatgaaggagcattggcgtctttaaatgggcagccaggccaaaaagaagatattctccaaattcccataacatttaatgttgtaggtgcaaatgtaggtgaagttggtgaacagcaaactgtaaatttgaaactgggaacagttgggagctatactgattcaattactcaatttgctgattctagtagtacaaaggctattattcaagatggatatggcatgggatatatggaaaattatgaaattgatcaaaatggtgtcatagttgggatttattcaaatggcataaggcgagatcttggtaagattgctcttgcttcttttatgaatcctggaggacttgcaaaatcaggcgatactaattttgtagaaacaagtaattcaggtcaagttagaataggtgagactgggcttgctggacttggtgatattaggtctggtgttttagaaatggccaatgttgatcttgcagagcagtttacagatatgatagtgactcaaagaggatttcaagcaaatgctaaaactattaccacttctgaccaattattgcaagaacttgtaagattaaaaaat

SEQ ID NO: 530 - DNA, 1344 bp, Borrelia garinii
atgaataaattagaagagcattatatagttcccaaagatgtggttttagaacttgataagtacataataggtcaagatgaagctaaaaaattagtatcaattgctcttgttaatagatatataaggtctagacttccaaaagaaataaaagatgaggtaatgcctaaaaatattattatgattggatcaactggcattggaaagactgagattgcaagaaggctttctaagttaattaaagctccttttattaaggttgaagctacaaaatatactgaggttggatatgttggtcgcgatgttgaatctatggttagagatttgatgagcattgcagttaatatggtaaaagaagagatgtataacactgtaagagatgatgcgttagtaaaaacagaagagagaatagttgaaagtctttttaaaggatctggtaattctgagaatgtagatccaaatgaaataaaggcggaggaaaaggtaaaagagaagcttagaaaaaagcttagagcaggtgagcttgataatactactattgaaatacaaatttctagtaaaatgccattttctacaatagaaatatttacaggtggtaattttgaagagattgatatgggaattggtggtttgttgggtaatatatttgatagaaaaaagaaaagagaattgaaaattaaaaaggcaaaggaaataattttagcagaagagcttgaaaaattggtcgatcacgaaaatatttcagatattgcaaaatctaaagttgaaaatatgggaattatttttattgacgagattgataaaatagctgctaagaataggagcggcaatgatgtatctagagaaggtgttcaaagagatattttaccaattatgaaaggctctaaagttaatacaaaatatggaatagttgatacttctcatattttatttattgcagcaggagcatttaatttggccaaaccttctgatttaatacccgagcttcaagggagatttcctattaaggttgagcttaagagcctaagcatagatgatttgaaaaaaattttaaaacaaacaaaaaattctctaataaagcaatatgttgcgatgtttaaggtttataatttagatttaaagtttagtgaagaggccatagatagaattgccgagcttacttttaatatgaatcttgagaatgaaaatcttggtgccagaagacttcacggcgttatggaaagagtgcttgcagatcttttttttgaggtacctggtagtaagttaaaaaaatttgaaataaacttggactatgttaataaaaaaatacaaattaacgaacaaaaagatttgaattattatataatt

SEQ ID NO: 531 - DNA, 681 bp, Borrelia garinii
atgagaaaaacaataataatagcgcttttctatggtttgatcacaaatatttaccctgaaataaaatcaacatcaaagctcaatgaacaagcaaacaaatataaaatagaaaaactttatcaaaaatcaatgctgttaaaaaactcaaaaaaatataacaaagctatagcaaatctaaaaaaaatagttaacatggatcaaaatcaagttgatgcccatcttttgctttcagaattggaatatttaaataaaaactggaagaaagcaattgttaaatctcaagattacttaaaaataatagactttaaagataaaaaaaactttttagatatctcttgggcatactttttaataggagaggttgaaaattcaatggactacataattaaatttttccaaagcggtaaggaattgttcaaagaaaatatatttatagcaattgatgctctttttaaaaaaagtatttatcattttataaataatgaaaatgaagcatttaatacaatattgacttcaacattccaattagcgcttaatgacgataccttattcataatttttttaaataatttagaaataataaaacaaatacccttctattattttaataggaaaaaattaaaagaattatacctacaaattagtgccttaaaaacaattcaaaacacaatgtgcaaaact

SEQ ID NO: 532 - DNA, 1128 bp, Borrelia garinii
atgaatataaagaataaattaatattgatgctgtgcattgtagtagcagtctcttttatcgcatgcaaaacgcctccagaagcaagagagagcaaaaatgctaaaattgcaaagccagatactaaaagttttgaattaagagatataaaagacattaaaaatgaagtaataaaagaaagaggacatcttttttattctaaagagttcaatgaagctgaaaaattagaagaagtaatgaaacaaaatttttctaaaaaaaaagcaaaagaagtaaatgaaattgcgctaaaagtgcttgaaagatataaaccaataataaaagaaccaagagaaaaaaaagaaaaagtaaattaccttaaagaaaatattgaaaagtatctaaacgatgcagaagcaaatgaagcatatatatggattcctttggaaatcgacgaagtaaacaacttgtacttcgaagcaacaagaaaatataaaaattacgatcttgacgatgcccttgacatgtatagcaaagcattcaacagagcacaacaagcggcaaaaaatgctaaagaagctaaagctttaaaagaaactgatgaaagaatgtataaacaattaaaagctcttgaagcggcttccaacttgccaatttatagcaacaataagcttattaaaccatcaccatggaatggtagagcatttattaaagaaagaaacagtcacttaaaccttttaaacattaatgaagacacctatcttcttggagaaacagaaactccaatagtactagcatatgcagaaaagttagaaatagcaaaaaactctaaacctcaagaacaattcaaaacactagaacttattgagcgatctagaaaattatgggaaaaaggagttgaggctaaaaatgtcaaaaactttagacttgccaatgaattatttttagaatctgcaagatacctagaagcttatcaaagcaatgcaagtagtgagctttatgtaataaaaataggcaataccttatggggcatttctaaaaaattatacaacgacccttacttatggccaaaaaattggtttggctacagacaaaaaatacaaaatccagatctgattcattccaactggaagataataattcctgctaaa

SEQ ID NO: 533 - DNA, 1581 bp, Borrelia garinii
atgaaattacaaaagttattattttcagtaatattttttctaacttttctttgttgtaataaagaggaaaaaaaagaaggaatatcatttaaaataagcctgggatcagaaccaagcagtcttgacccccaattagcagacgacaatgtcggatcaaaaatgatagacacaatgtttagagggcttattacaggcgatcctaacacaggaggaaacaaaccaggacttgcaaaaagttgggatatttctcctgacggaacagtttacacattcaccctaagagaaaaaatcatctggagtgatggggttgcaatcactgcagaagggattagaaaatcttatcttagaattttaaataaagaaactggctcaaattatgctgaaatggttaaatcaaccattaagaatggtcaaaaatattttgatggacaagtgtctgactctgaacttggaattagggcaattgacgaaaaaacattagaaataacactcgaatcaccaaaaccctattttatcgatatgttagtacaccaatcatttattccaataccgattcatattgccgaaaagtatggacaaagctggacaagccctgagaacatagttaccagcggtccttttaagttaaaagaaagaattcctaacgaaaaatatgtggtcgaaaaaaatgataagtactataactcaaaccaagtagaagtacaagaaattacattttatacaaccaatgacagctcaacagcatacaaaatgtatgaaaataaagaattagatgcaatatttggctccataccgcctgatttaattaaagatctaaagttaagaagtgattattactcatcagctgttaatgctatatatttttacgcattcaacacgcacattaaaccattagacaatgttaaagttagaaaagccttaactcttgctattgatagagaaacacttacctataaagttcttgacaatgggactactcctacaaggagaatagcccctaactttagctcatattcttatgcaaaaaatttggaattatttaatcctgaaattgcaaaaacccttctagctgaagctggttaccctaatggcaatggatttcctattttaaaattaaaatataatacaagtgaagctcataaaaaaatttgtgaatttattcaaaaccaatggaaaaaaattttaaacattgatgtggaacttgaaaacgaagaatggacaacttacctaaacactaggtcaaatggaaattacgaaatagcaagagcagggtggataggcgattatgctgatcctttaacatttttaagtatattcacacaaggatacacacaattctcatctcacaattattcaagcccagaatacaacgaacttattaaaaagtctgatcttgaacttgatccaataaaaagacaagatatcctaagaaaagcagaagagataattattgaaaaagattttccaatagccccaatatatatatatggaaatagttaccttttcagaaatgacaagtggacaggccggaataccaatattacagaaagattcgatttatctcaactaaaattaaaaaaa

SEQ ID NO: 534 - DNA, 1623 bp, Borrelia garinii
atgaattttaataaagctaagaaaattggtagaaaaatcaaaatagcagcactaattatgcttgccatatctttaattacatgtaataacaattcagaaaaggaaaaattaacatttaaagtatacatagggggagcaccttcatcacttgacccacacttagtagatgagacaatcggagcaagaattttagaacaagtattctcgggactcttagcattaaataccaaaacaggaaagctaatgcctggacttgctaaaaattgggaagcctcaaaagataaaaaaacatatcaattttacctaagagacaaccttttttggagcgatggagtttcaattaccgctgaagggataaaaaaatcttttttaagaattttaaataaagaaacagaatctacacatgttgatatgcttaaatcaataataaaaaatggacaggaatattttgatggaaaagtatctgattctgaacttggatttaaggcaattgatagcaaaacattggaaataacacttacatctccaaaaacctattttcttgaattgctcctacatcacacattcatgccagtgcctattcatgttattgaaaaatataaggagaattggacaaaccctgaaaacatggttaccagcggtccttttaaattaaaaaaaagattgcctaatgaaaaaattatatttgaaaaaaacgaacattattacaatgcaaaagaagtagaacttgaagagcttgtctacattacgtctgacaatgatatgactgtatataatatgtacaaaaacaatgaaatcgatgctatttttaacagcataccgccggatattgtaaatgaaataaaactacaaaatgactattatcaacacaaaagcaatgcaatttatttatactcgtttaatacaaaaataaaaccccttgatgatgctaaggttagagaagctttaacgttagctattgacagagaaactttaacttacaaagtacttaatgacggcacagttcccacaagagaaataacgcctgatcttgaaaattacaattatggcaaaaaattggctttatttgatcctgaaaaatctaaaaagcttttaacagaagctggatatcctaatggaaaaggattcccaaccctaacgctaaaatataatacaaacgaaactcataaaaaagttgctacatttattcaaaaccaatggaaaaaaattttaaatataaatattatgcttactaatgaaaattggcctgttcttaccaatagtagaaatacgggtaattttgaaataataagaattgggcgcattggagaatatttggatccacacacatacttcactatattcacaagcaaaaattctcaacttgcatcatacaaatatgcaaacttagaatttgacaagcttatcaaagaatcagattttgagcaagatcctataaaaagaaaaaatttactcagaaaggcagaatcaataataattgaaaaagattttcctgccgcaccaatatacatatattctggacactatcttttcagaaacgataagtggactggatggagtcctaatgtatcagaaatttattatttttttgaattaaaatcaattaaaaatgcaaaacgaaat

SEQ ID NO: 535 - DNA, 1197 bp, Borrelia garinii
atggaagaaaatgattttattaaatttgggagttatttgagaaaagttagaaatggtaaaaatttgactcttgaaatggtcgcggaggatattaaaatttctattaagtatcttaaagctcttgaagattctaatattgaaatttttccaaatgaagttttggctgttggatttttaagaacttatagcgaatatttagatattgattctagattgatatcaacactttttaaggattataaaagtaaacttaataatagttatattgggattagatctgaagataaaatttcaaatttgggatttttaagcgataataaagttttagataaaaaattgttttttttaaatttagagtccttaagtatattgaaaatcctgctaggaattgttggtgttattttgctattgtttgtgttttttgcttttagagaagtggaagtttattttaaaaaattttttaagcttagtcagaatgaaaagataatttcaaatcttcatgaagtatcttttgataaaaagaatttttggaatatttctcttaaagaaggagattctttatttttaacgtatggcgataatattgcaaaatatagagcatcttttattagtgacgatttagttattgttgatgagtctaaaaaaagtaaaaatatttttaatttaggagagtttaaagagataaatcttgatgataatataagagtcaaaattatttatgagaattattattatgataagtctaaaatagccaatgtaagtttagaatcttttgctttaaatgttaaatatgtatctgagactaatattgacaataggtttaatattttaaattggcagtttgatgttaagggaactgaaaaattaccaagtggcgattatcttactctatattcttctcagaaactttcaaatgttgatttaaaaatcgattttttaaatgatacattttttagatatgccgatgaaaacaatcttcatggcaagtctttttttgcatccaaaggtattcctattaatctagcttttgaaaaatctttgatactattcttttcaagactttctgatgttaatattattcttaatgaaagagatattactccttttttaaaagagcagggaaaagaaatttttgctgttcaattcttctgggtaaagacaccttcagggtttgatcttaaagtttctgaagtttat

SEQ ID NO: 536 - DNA, 1416 bp, Borrelia garinii
atgtctttgaattacgttgaaataaatactttgattaaagaaatccctttcgcaaactctttaataaaagaaataatacagccggattataaaagtttgattttagagatttacaataaaattgacaataaaaaatttaaaatattaatctctttaaatccaagcactaccagattccatataacaagaaaaaatttcaaaaagaatgctttaaaattaagattttctgacttcttaaaatcaaaaattcaaaatggaaaaattctaaaagcttcccaaatgaaaaatgaaagaataatttatcttgagatttttaaaaaggacataattatcttattcattaaattgtggccatcctctccaaatataatagctacaaaccaaaactttaaaatactggacgcatattacagaagaccaaaagcaaaagaaacaacgggtgaaacctttttaaaagctaaagaaatacatgaaagcaataaaatgcctgataaaaaaatcatgggtctaaaagaagaatacgataataccagccataaatcttattctgaatttcttgaaaattactacgaatcactcagtaatcaaattaaaaaaaacaatataaaagaattgcttattgaaaaatataaaaaagagttaattgctttagaaaaaagaatagggtctttaaaacaacaaatcaaactaattaaaaacattgaaaatgaaaaggaaaagggtgagttgattttattaaatataaacaaaatacaaaaagggatcaaagaaatagccctcttaaattataaagaagaaaaaataaaaatatcgttaaaccaatcgttatcgccaaaagaaaacgccttacaatattttaaagcatacaaaaagggcaaaaattcttttgaaaccatacaaaatcaattaaaagataatctagacaaatttaatctcattaaatcaaaaataaatatgttaaagatcaaaaatttcattccaaaagaagaatataatcaagaagaaactgctattaaaaaaaaagaaaaaacaccaaaaataggcttacattttacctcttgtggatttgaaattcttattggaagaaacgcaaaagaaaacgatgaacttttaaggcgctgtgttaaaggaaatgattattggcttcatacaagagattatcctggagcttatgtttttattagaaatcaaaaaaataaaactccttgccttgatgtccttttagctgctggtaatttatgcgtattttatacaaaattagcaaaaaaatcaggaaaagcagatctttactacacgcaagttaaaaatttaagaagggttaaaaacggaaaactaggccttgtaattccaaaagcagaaaaaaatttacatattaagctagatgaagatctaataaaaaaaataaaaaataaaacc

SEQ ID NO: 537 - DNA, 1797 bp, Borrelia garinii
atgaaaagagaaatatatgcatttttgagcaactttattatttttctatgttttttcctaggattaatctttagttattcttatttttttggagaaaattttttagaaaagcataggctaatagcagctttttttgattctattttgcttttttataagtatttttatggattttttatttttattgtttgcatttactttgctttttttgttcagcaagaaataaagatttatttaaaatcgtataatggatatttattttctaggctttatgcatttttactattattttttattatagggcttttttttacttttatatttaatttaatattgccttatataattgcccagagaaatgagtataagtttagttatgatagatataaccttcttgaaagtgaagcaaatgaaatatctcttaaaattaaaaatatagatataagtttgtcttcaaatagactttttttatctactgatttgtcagattcaatgaagcaaaaaaggaaacatcttgaaaatttgattagaatatatgataaaatgcgaattatttatgtaaataatgaagagcttttaacaaattattatttagtgaaatctgaatataataaaattccaagctatgatgttgatttggaaaaggttaaaaaaactttttcaaggtatcctttgcgaagccttaaaaagcaagatttttttaatattgttaatgaatttatttcccaaaatgattatcatacggccaattactttgcttatattgcttatgttgcaacaaaagacgataattttgttgcgcttttaaatttgactttaaagtttattaatgaaaacaggaattttgaaaaagaaaaaatgcagttgatttctgaagaaaagcaaaaaaattttttgtatcttaatactgaaaagtttaaattagcttattacggtttttctaatcttcataagctattgcccagtgataatgaaattttaaattataaaaataaatcgcttgaaaaacttaggaaaaagtatcttttttttgatgagattgaaaaatattttgaatattatggaataaacgatgtatttttattgcagccagattctaataaaaggttttatgattatatttatatgcaaaaagttgtcactcttaataattattctaaaataataaaaaattttgagcttattagatttaataaggcaggaaatgttatattgcatattaaaattccatttgctactttgagaggtaattttgtgtatcaaaatgttttaaacaaagacgatgagcagagtgaaattactcttaccaaagtttttgtgtctgtggatagttttgatacgaatgttttagaggttgtaaaaattaatgagaatgtagaaaatttagctttattttcaaatttctctgaggttggattttttttaaaaattcaaagtttgtcaagcgcttttaataaagttgctatattaaatttgaaattaattaatattttttccttgagcttgattttgctgatttctcctattttgctagttttaatgggggcattttttatctctttgttttctaaaatagaatttaattttaattccaaggctatgatttttttagtttcattaatgatagctattttttctgggattatttgtctttttgtaaattattttttaattgtctttacctctcttcttatatatacttttaatagtgtacacatatctttagctattctttcttcgttattgtttttccttatttttaaagtcattgttggaaattacaaggaaaagcatatt

SEQ ID NO: 538 - DNA, 1428 bp, Borrelia garinii
atgaaaaataaatttttaatatgcgcgtattttttactgactctgagcataagttctttagtaattgttgaatctatttttgctgttgatgagtctaataataataagttgtcaagatctagttatgagcagatgatgattcaagcttttgaatttgtaaaagaaaattatgttgaacctgtaaacgatgaagtgatttttgaaggtgctttaaaaggaatatttcaagccctaggggatccttattctcaatatttgacaaaaaaagatttagaagaaatttcaaaaacaacagtaggagattatgttggtattggaatttctataataaaaaaaatgcattctcaagataagcaagacaaggcaaaaaatcttgattctaatagcttttgtgtttctattgttacaccttttgagggaggtccggcttataaggctggaattaaatctggagattgtattatcgctgttgatggcaagagtgtttcttctatggaagtagatcaagttgttgatcgtttaaaaggcaaagagggtacaaaagttaaagtgtctattcttaggggaaaagatttaacattagattttgaacttacaagagaaaagatagaaatacaaacaatcaagtatgatgttattaatccagatattggttatataagaatagtaagctttaatccatacacttctgtagattttagcaaagctttagacaatcttaagaatagaaatattaaatctttaattctggatttaagacttaatactggtggatattttcaggcagctataaaaatggcagatgatattttatctaaaggaaccattgtttctacaaaatcaagaaattctagcaagcctattgattacaaggcaagctcaaaacaagttttgccttcagatataaaaatcgttgctttaatagatagatcatcggcgtcagcgtcggaggtttttgtaggggctttgaaagataataagagagcctatattataggcgaaaagtcttacggcaagggagttattcagcatgtagttcctttttatactggtggatttaaaattacaagctcaaagtattatactccatctggaaagagtatccacaaagttgggattgagcctgatttagaaataaaatctccagatttttctgaggaagaagcagtaatatataaagaaatttttgataaaaagctaatagaaggctttttaaaaggcaaaaaatccattactgagcaagagattgatttttttgttgagaatcttgttaaagaaaatccaaaatataaaattgataaagaatttttaggcaagtatgtgttttttaattactatcaagataataataaagaactcccaatttataatctacattatgacaaggttttaaaagcagcttgtgagtatttatctaaattaggtaat

SEQ ID NO: 539 - DNA, 1374 bp, Borrelia garinii
atgaaaaaacaaaatccatggatatctttaagcgaagaagaaaaaaatcaaattttcaatttttccgaaagttacaaaaaatttataagtaaatttaaaacagaaagagaagttacatcctatgctctagataaagcaaaaaaaagggggtttattgatgctgaggagaaaaaaaatttaattccaggcgataaaattttttatacctgtagagaaaaatctgttgcttttgctattattggcaaaaatcctattgaaaatggaatgaatttaattgtttctcatacagattccccaagacttgatgcaaagccttccccaatctctgaagaaaacgaacttgcatttcttaaaaccaattattatgggggaataaaaaagtaccagtggttatctacacccctttcaataagaggtgtggtattcttaaaaaatggagaaaaagttgaaatcaatattggagacaatgaaaacgatcctgtatttgtaattcccgacattttacctcatcttgataaaaaaatacaaagaaataaaaaatcagatgaaattattgagggagaaaatctaaaaattttaattggaagcctaccaatcgaatcaaaagaacaagataaagttaaactgggaactctgcaactaataaaagaaaaatacaaaatagaagaagaagatttcgtatcatcagaaattgaaatagtacctgcaggaacagcaaaagacgttggatttgacaaagctttaattggtgcttacggacaagatgacaaaatatgcgcttacgcttcactagaagctatatttgatcttgaagagattccaagcaaaacagctatttgttttcttgtagataaagaagaaattggctcaacaggctcaactggattagattcaagatatcttgaatattttgtttctgacatgatctttaaaattaaaaaatcagaatacaataatcttcaagtccaaaaagctttatggaattcaaaaagcatttctgctgatgtttgtgcagcaataaacccaatatttaactcagttcatgacgcacaaaatgctcccaaacttggctatggcatacctataatgaaatatacaggacatggtgggaaagttatggccagcgatgctgatgccgagcttgtttcttatattaggcaattattaaataaaaacaatatagcctggcaagtagcaacacttggaaaagtagaagaagggggcggaggaactgttgctaaattcttagctagctatggaataagaacaatagacatgggacctgccgttataagcatgcattctccaatggaaataacttctaaatttgatttatacaatgcttatttagcatacaaagctttctacaaggaa

SEQ ID NO: 540 - DNA, 1023 bp, Borrelia garinii
atgaggattgtaatttttatactcggaattttgttgacttcttgcttcgctgggaatgaaatagaatctggctcaagtaaaattaagatatctatgttggtagatggtgttcttgatgacaaatcttttaattctagtgccaatagggctttattgcgcttagaagaagattttccagaaaatattgaaaaagttttttctagtgctgcctctggggtttattctagttatgtttcagatcttgataatttaaaaatgaatggttcagacttgatttggcttgtagggtatatgcttacggacgcttctttatcggtttcattagagaatccaaaaattagctatggaataatagatcctgtttatagcgatgatgttcagattcctaaaaatttgattggtgttgtttttagaatagaacaaggtgcttttttagctggctatattgcagctaaaaaaagcgtttctgggaaaataggttttatagggggagtgaagggtgatatagtagatgcatttcgttatggctatgaagctggtgcaaagtatgctgataaaggcatagagattgtaagtgaatattccaattctttttctgatgttaatattggtagagccatagctaataaaatgtatgctaaaggtatagatataattcattttgcagctggtttagcaggaattggtgttattgaggcagcaaaagaacttggtgatggttactatgttattggagctgatcaagatcagtctcatcttgctcctaggaattttattacttctgttataaaaaacgttggcgatgcattatatttggttactagcgaatatcttaaaaataataatacttgggaaggtgggaaaattattcaaatgggattaagagatggtgttgttggcttatctaatgcgaataaatttgaatacataaaagttattgaaagaaaaatagttaatgaagagattattgttccttataatcatgaaggatatgaaatttttataaaacaaatattaaagtta

SEQ ID NO: 541 - DNA, 4131 bp, Borrelia garinii
atgaaagagataaaagattttgaaaaaataaaaattaaaatagcatctcctgatcaaattagaaattggtcttatggagaggttaaaaagtccgagactattaattatagaactttgagacccgagaaggatgggcttttttgtgaaaggatttttggcactacaaaggaatgggaatgttattgtggtaaatttaaatcaattagatataaaggtattatttgtgatcgttgtaatgtagaagttacccattttaaggtaagacgtgaaagaatggggcatattgagctagcagctccagttgcccatatttggtattacaaatatataccctctaggattggtcttttgcttgacattacagcatctagtttaaattctattctttattatgaaaaatatgtagtaattgaaccgggtgatactgatcttaaaaaaatgcaacttttaaatgaagatgagtatatagaggctagagagcgatatggaatgtcttttaatgcttcgatgggagctgaagctattaaaactcttcttgaaaatcttgatcttgatgaactttcatctaagcttaggattcaaatgatagataaagatgataaaactgataagaaacttttaagacgtcttgaaattattgaaaattttaaagtttctggaaataagccagaatggatgattatggaggttcttcctgttattcctccagagattaggccaatggttcagcttgatggagggcgctttgcaacatctgatcttaatgatctttacagaagagttataaataggaataatcgtttaaggaagttacttcttcttaatgcgccagagattattgtgagaaatgaaaaaagaatgcttcaagaatcggtagattctctttttgataattctcataaaagaaaggttgtcaaaggctcatctagtagacctcttaagtcgctttctgatgcgttaaaaggcaagcagggaaggtttaggcaaaatcttcttgggaaaagagtagattattctggtcgttctgttattgttgttggacctgagttaaagctgcatcaatgtggactacccgcaaaaatggctcttgagctgtttaagccttttgtgataagaaggttaattgagagtgaggctgtttttaatatcaaaagagcaaagaatttaatcgaacaagaagtggatgaggtatggcaaattttagattttgttataaaagagcatcctattcttttaaatagggcgcctactcttcatagacttggaattcaagcttttgagcctgtgttagttgagggtaaggcaataaaattacatcctcttgtttgtcatgcatataatgctgattttgatggtgatcaaatggcagtgcatgttccccttactccatcagcacaagctgaaagttgggctttaatgctttcaacaaacaatcttttaaatcctgcaaatgggcatcctattgtttttccatctcaagatattgttttaggtctgtattatttaacgatggaaaaaaagaatattgttggagaaggtaaaaagttcttaaactttagcaacgttattctcgctataaacaatagaagtctagattacaatgcttctatttatgtaaaaattgatggcgaatacaaaaaaactacagcgggtagggttatatttaacgaggctttgcccaaaggaattgaatttgtaaataaaactcttagtgatttggaactacaaattttaatatcaaaagtttatgtagttcatggttcttctactgtaattgaaatgcttgacattatcaaggagcttggctttaagtatgccactaagtttgggtgcacaattagtatgagcgatattattgttcctgatgaaaagaaaacttatatagatagggctaataaagagattgctaaaattcaaaatgattatgccaaaggtgttattactggtgaagagcgctataataatgtagtttctgtttggttaaagactaatgaagaacttactaataagatgatggaaattttaaagaaagacagagatggatttaatgttatatatatgatggcagattctggtgctaggggtagtagaaatcaaataagacaacttgctggtatgagaggattaatggcaaaaacttccggggatattattgagcttccaattatttctaactttaaagaaggtctttctgtgatagagttttttatatctacaaatggagctagaaaaggtctagcagatactgctcttaagacagctgatgctggatatttaactcgaagattagtagacattgctcaagatgttgttgttagaatagaagattgtggaactataaatggaataaaagttgaaactgtcaaaaatggtgaagaaatattagaatctttaaaagaaaaagctgttgggagttattccattgaaagaataaaaaatccaattactggtgagatcgttttagatgcaaatgaagaaatctcagaagccaaaatagaattattagagaaaattggtattgaaaagcttgtgattagatctgttttaacatgtgaagctgaacatggtgtttgtcaaaaatgttatggtagagacttttcaaagaataagcctgtaaatattggcgaggctgtaggaataattgctgctcagtctatagggcaaccaggaactcaattgaccatgagaacttttcatattggtggagttgctcaggccggcagtgaggatgataaaatatctttaaagaatgcttttatacttaatagcatagagggttttaatgttaatgttgacaatggaattcttttcacaagaaaaggaactttaaaaataatcaatgttttttatgaagaaaaaattaagaacataaaagagattaaagttttagattctcaaagagtaatcaaaggaattcctttgtttgttaataaaaagggtgtagagattctctcttcttatattggttatgctaaattaagagacgataaatttttaatagtatcagaagagcaagaagttgctttaaaagctggcacaaagcttgaaataggggttggtgattatgttgaatcaggtaaagttatcggcacatttgatccatttgcagagcctattattgcagaagttaaaggtaaaattaaatttaaggatattattttaggaaccactcttaaagaagagattaatactgaaacaggaaatgttgagaaaagaattacagataatgtttttgaatctcttgatcctaggatttttattattgatagtagtggtatggaggttgcatcttatgtattaccaggagatgcttatcttcaagttgaagatggtcaaaatattaatataggagatgttattgcgaaactttctaaaggctctgaaaaaactcaagatattacagggggattgccccgtgttaatgatctttttgaaacaagaatccctaagaatttaaccgaaatggctaaagtaagtggaattgtgcaatttaaatcaattcaaaaaggcaaaaggcttattaatattttagatgagtatggggttgaacataagcattatattccagccggtaagcatcttttagttagagacggagatgttgttaaagcaggcgatatgctttgtgatggcagaattaatccccatgatgtgcttgaaattttaggtgggattagtttgcaagagtttctgttggcagaaattcaagatgtttatcgaaagcagggtgttagcattaatgacaaacatattggtgtgataattaaacaaatgatgaaaaaagttaagattgtagcagttggtgataccaattttgtttatggacaaaaggtagataagcatactttttatgagcaaaatagaaaagtaatcgagcaaggtggtgagccagcaatagcaagtcctattcttataggagtaactaagacgtctctcaatatagattcttttatttctgcagcttctttccaggaaacaacgaaagtattaacagatgcttctattgctggaaaaatagatgatcttaggggattaaaggaaaatgttgtaattgggcatttaattcctactggaaccggtatgggactttataaaaaaattaaagttagtgaaaatatcgatgctaaggtt

SEQ ID NO: 542 - DNA, 3465 bp, Borrelia garinii
atgataaaaagagttcatctgggacaaggaagagctgatgagattttagacctacctaacctgatagaaatacaattaaattcttatgaaaaatttttacaacttgataaattaaaaaataaaaaacctttacttaatgaaggccttgagtctgtttttagaaatatatttcccatcaaaagtggaaatggtgatgttgctcttgagtatgaaaggtactatatagaaaacgatgcccttaattttacagaaaaagaatgtaaaagaaagggccaaagttatgaagctgttttaaaagtaagactaaatttacaatttttgactactggagaaataaggcaaaaagacgtttacatgggaactattcctttaatgacagaaaggggaacttttattattaatggggccgagagggttgttgtttctcaaattcatagatccccaggagttgttttttataaagaaaaagatttgtattctgccagaataattccttatcgtggttcttggttagaatttgagattgattctaaaaaggattatctttatgtaaagatagatagaaaaaaaagaatactcataactctttttttaagagctttaggatttgatacgagagaaaaaataatagaaactttttataacattaaaaaaattaaagttgaagacagtacaaaaagagatcttccgggtcaatatttagctaagagcattaatataagagagaatatgtattatcgagcaggagataagattactctacaagatgttgaagattttttgcaaaatggagtaaacgaaatagagcttgttgattttgatggttatgatgctatttctggaaagtgctttgtgagttcaaatgttattttaaattgtcttgagaaagaggatgccttttttgctttaaaggatggctctaaagagcttccaaaagaatcagttatgcttgctgtttatggtgctctttttcctggcgaaccaatatcgattgataatgctgaaaatgatttaaaaactatattcttttctgaaagaagatatgatcttgggcgtgtggggcgctataaactttctaaaaaatttggatttgacgatttaagtacatcggttttaactatgtatgatattgttaacaccatatctcatcttttaagaatatatgaaggtcatgatattcttgatgatattgatcatttaggaaatagaagggtgcgttctgttggggagcttcttaccaatatatataaaggcgcgatgtcaagagttgaaaaaattgctaaagatagaatgtctaataaggaagtttttaatctaaagccccaagagttaataagcgttaaacctattgtatctgctgttaaagaattttttgcaaccagccagctttcgcagttcatggatcaggtcaatcctttggccgaacttacccacaaaaggcgtcttaatgcccttggaccagggggactttcaagagatagagcaggatttgaggtaagagatgtccattatactcattatggcagaatgtgtcctattgaaactcctgaaggaccaaatattggacttattgtttctttagctacttattcgagagttaatgattatggttttttggaaactccctataggaaagttgttaatggagaagtgactgacgaattagaatatttatctgctattgatgaagagaaaaagtgcattgcgcaggccaatgccgcctttaattctaatggaaagtatcttgaagatttagtttctgttagaatttctggtgattatactacaacaaaccctaaaaatatagactatatggatgtttcccctagacagctgatttcagtatcttcggcattaattccttttcttgaacacaatgatgcaaatcgagctcttatgggttctaatatgcaaagacaagcagtacccctgctttttcctaaacccccaattgttggcacagggatggaaagtgttgttgcaaaggattcaggagtagtagttaaggctaaaagaagtggggaagttattcttgcaacaagtagtaaaatagttgttaagccttttgaatcagaaaatgctaaagatttagatgaataccatattgttaagtatgaaaggacaaatcaagacacttgctttaatcaatctgttttagttaaagagggtcaaaaggttgaaagtggagaaataatagctgatggccctgctactagatatggagagcttgctcttggtaataatttattactaggggttattccttggaatgggtttaattatgaggatgctatattaatatctgatagaattgtaaaggaagatctttatacatctattcatattaaagaattcagcatagaggtaagagaaaccaaacttggtcctgagaaggttacaggagatataccaaatgttagcgagaagatactaaacaaattagatgaaaatgggattatacggataggaacctatgtgaagcccggtgatattttagttggtaaagttactccaaagtcagaaggagacattactcctgaatttagacttttaacttccatttttggagaaaaagcgaaagatgttaaaaataattctttaaaagttcctcatggtactgaaggtacagttattgatgttcaaaggattactaaagaggatgttggtaatctttctcctggggttgaggagatacttaaagtttatgttgctaaaaaaaggaagcttaaagagggcgataaaatggctgggcgacatggtaataaaggtgttgttgcaaaaattcttcctgttgaagacatgccttatcttgcagatggaacccctcttgatatatgcttaaatcctttaggagttccatctaggatgaatattggacagttaatggaatcgcaattaggccttgctggtaaatatcttggtgaatcttataatgttcctgtttttgagtctgccacaaatgaacaaattcaagaaaaattgaaaaaagctggatttaatccaacttctaaagaaattttatatgatggttatacaggagagccgtttgaaaatgaagtaatggttggcgtgatttacatgcttaaattgcatcaccttgttgatgacaaaatgcatgcaagatcaacaggaccatattctcttgtttctcaacaacctcttggaggaaaagctcaatttggtgggcaaagacttggagaaatggaggtttgggcccttgaggcttatggtgcggctcacactcttcaagaacttttaacagttaaatctgatgatatgtcgggtagagtcaagatatatgaaaatatagtaaaaggcgttcctactaatgtatccggtattcctgagtcttttaatgtgctaatgcaagagcttagagggcttggacttgatttgtcaatttacgatgacaatgggaatcaagtccccttgacagaaaaagaagaagaattgattaataaaggc

SEQ ID NO: 543 - DNA, 1041 bp, Borrelia garinii
atggaaaaggtatttaaaataaaaaaaatttgcttttgtttgctgcttcttttgcaagcaaaaatagttcttgcccaaaatcaacacgacttaaaattcaataatgaatatttttactttaattttcaatcggcttattaccctccccatgagctaggaacaagtggaagtaacttttcacaaagctttaaacaccccaacttccaaaatattgaaccaagtttaaaaattccagccaattattggggaggaataaaattaatatcatacttaggatactataaaaattttaaagctttacacaatcctaattctatattttttaaaaacaatggcatagaagtcgatttaaatatcggattatctcctgtaagtatctcgcttaaaagcatgctaagctttactcctattgcttttttaaatttatatgtatcaaatgaaattggtatgggctggaaagcttttggatttaaggggattggtgtgcacattgaaaatggaaaatattcaaatgatattgaattttattcagaaataacaatagggggacgattccaatttgatttaaacgctatttttaaaggggaatggacacacattattacagttattggaaatgattttacatacttaattaatcctcatgcaaataaagatcaactttggaaatataaagcagacgatggcaaaaatataaatggcatgctaataaagccttacgctcttttagcttacaaaatgccaataccccttaacaccataggactactttacgaagggaaaacacaaattggcaaagaaagaaacataagctcatggaaaaacaaaggttggggaagtgatattttttatcacaatatttctcttattgctaattttgaagttgtcaaacctttaacaattggccttcaattaaaattatctacaaatcctacatacacaagtaacacagctgggctagctgatgtttcaaaaagaatagcaactggcaattcctatttttactacgattctatcggaatctctgtaacttataaatac

SEQ ID NO: 544 - DNA, 4488 bp, Borrelia garinii
atgaaaaaagcaaattttttaagtattaattttttaattttgcttttggtttgcttttttaacgttaatttattttctaaggatattttcaagtttaagcttgtagggcaatattttcctttttactataagaatggtaaaggaaaatatgaagggcttatttttcctattttagacaaatgggcaaaagataataattttgatattagagttgaaactattgacaatttaaatgaaagtaaaattgaagacgactccatatatttaggattaacttataggtcaaaattaaatgatttattttattttaaaagtgagttttcgaggagcattgcaattttattttctaaaagctctaataaaaaatataaaaatgctcattcaccatggttatctaattttaatataggagttgttaaaaatccaatatatgaagaattcttaaaactaagacgtgctaacactatttttttggttgataatgctgaagagttattattagctttaaaaaatgataaagttgactatatatatggcgattgtaagactttagcttatattgcaaagcgttttttaggtgaagatcttgcaatttttaatggagatattttttatagtatcaaaaatagggtggctattagtagaaatgctcctgagataataaagaatttaaatttggatttgttttcgtatttaatggaaatacccgatgaacatgttttttcttttttagatagtacttctaagggtaattttattgatattggcttatataacgattatccccctttaagttttattaattcaaaggggaagttgtctggtattttagtagatttatggaatcttctttcaaggcagcatatctttaaacctattttcaagggatttcctaaagaggatattaaaaaatcattagatggaaagtcagtaggcatttttggaggaattattagtaatgatagtgtatttaaaaatgttaattatgtggtaagtaagccaatatatcctcttaattttaaattttattctaaagggttaagcaataatgttggcccaataaattctcagtttattgattttgattttaataatattcaattaaataagaatcaagatattgttaataactttatagatattgttaataattcatatgggtttatagaaaattcaataacaacaaaatatttattaaaattaaatggatataacggtagattaaaatcttacgattcgatttttaataaaaatagatttttagtattagctattgataacaggatttataaggttattaaatatattcttaattctatatttgatgatatttcatttgaatctttacttcaaatagataaaaattggttagataaagaagagattaatagttctcgaataaatagttataaaattatgaataagcttaaattcaatatagaagaaaaaatttggttattaaaaaataataaattaaatcttgctgttaaaaattggtatccaatagattatgttgaagcaaataattataaaggaataaatcaatttttgcttgataagattagaatgttttcagggttagaatttaacataattgaaacacatagcatcttagatctcaaaaaattaatcaaatctggaaaaatcgatatgctaaatactaatgcgatcgattcaaatttagataatgtttttaatataaaattaaactctagaattccactttatattttttcaaataaaaaaagggtgcttccatctaggtctttagagaggtttgctgtacttgattttttgtataataaaaacttgacttctaatattaaatcaaaacttattttggtaagtagctttaaagaagccttacttcttctttataagggaaagatagatgggattattagcgatgagtatacagctgccgctgtttttgaagaattaaatgttgccgatgttgaaaaacttcctacttttagagatttggcttttgatttgagtcttgctatttataatcaggattatatcttgaaagaaattattcaaaaagttgttattcgttcaaacgttgatagtcagaagtatttaaatgattggaaatttgatatttattataaatccaaaggcattaggtttaaaaatttcaaatttttagtgttaacagtcattatattttattttacttttttaggatttgtaataattcttatgtttaaattatcgtttgagcagaaaagaaaatatttttctgtaatgaatgaaaaaaagattgcagaatctgccaatactgctaaaactatttttatagctaacattagccatgatattcggactcccattaatggaataatggcggctactgagcttttggataccactattcttacggatgttcaaaaagactatgttaggatgataaattattcgtctgattctttactttctttgattgacgatatattgtatttgtctcaaatagatgtcaatgaattatatgttgatagtcaagagattgatttagagagtgaaatggaaatggttttaaaaatttttcaatctcaatgtgcaaagaaaaatattgatttattctcttattctaaatctatttttaagaattatataaaaggtgacattgtaaaaattaaacaagttttaattaatttaataggcaatgcttttaagtttacagatgatggtgttattgttttaaactatgaagaagtatgtagaacaagagttgatgataatagagtattagttacagttgagtttaaggtaatagatacaggtaaaggtattaaaagggagaatctttctaagatatttgaaatattcaaacaggaggatgattcttcttcaagagtccatgagggtgcaggactaggattgtcaatatctagagagcttataaggctaatgggtggtcttggcattgctgttgatagtaaggtgggggagggggcaactttttcatttatgttgcctttttacttaggggatgagcttaaaagtgaaagtttatcaatcaatacatttcaattgataaatagtaataataaggttaaggtattgaatgtgctcttgagtcaaaaatctattaaaatttttgagcattgttcgactttgttgggcgaatcttctaatgtagattatgtagcgtcttttgaggatgcttataaatcctttaaggaagcccctttttataattttgtttttgtaaatgtaaataacgacaatattaaagagagtattcgatttgctaataatattgaaagactaagccctgatgtacaaattatttttttattttattatttagataataaagctttaaaaaatttaaaatatatgtatgttaaaaagcccttaatggggcttggcatatcttctattctttctaaaaaagagtttaaaatagaaacggattttgaagatttggttccaatagatagtgcttttaagataaaaggccctattaatgtgttaatagctgaagataatcaagtaaatcaaaaagtgttgaaagacattctcgttgtaataggtattaatgaaaatcttattgatgttgtagatgatggattaaaggctttaaaatctttaaaagagaaacaatataatatctcttttattgatataagaatgccaagatatgatggattttcagtggctagagaaattagaaaatttgaaaaggcaaagaatttaaagccatgtgttttggttgctgtaacagctcatgctttgcaagagtataaagaccagtgttttgaaagtggcatgaatgattacatctcaaaaccaatacacataagttcaattaaaattatattaaaaaaatatttacagtttgaagttgatgatacttgggagaataaagatttgaatcaacctgttaattttcctcatttagatattaatagagctttaaaagaattaaatctttcatatgcattatattctgaattatgtagaggccttgtcgattttatctctattaatattattgatttagaaaaagcttttgatgaggaaaatttgcctttaattagggacatatcacattcaatatctggagctctttctaatatgcgtagcgaattgtataaagattttaaaaaaattgaaacaagtaaagattcaatttatgagttgaaaaaaatgtattcttttgtaaaagatgatttattgagactaataaacaacataaaggagaatgttttacttgagtctgaggttattagtgagaataagttatactttaaaaacaatgatcaatttttaacccttctcaacaagcttttaattggtattaagactagaaagccaaaagaatacaaagaaattcttgaaagcattgaaaagtatgttttagacgataatattcagatattatttagtgatcttcgcaggaatttaagattatatagattcgctgagagctctaagattcttaaagagattattgaaatgtttagtaataagagatat

SEQ ID NO: 545 - DNA, 780 bp, Borrelia garinii; identical to SEQ ID NO: 307

SEQ ID NO: 546 - DNA, 1902 bp, Borrelia garinii
atgaattatgttgctagtaacattcaggtcttaaaaggacttgaggctgttaggaaaaggcctggtatgtatataggctctgtttctgttaatggtttgcaccatttggtttatgaggtggttgacaatagtattgatgaggctttagctgggttttgtgatagaatagatgttgttattaatttagataataccataactgtaattgataatgggagagggattcccactgatattcatgaagaggagggaattagtgctcttgaacttgttttaacaaaactgcattctggcggtaagtttaataagggtacttataaagtttctggtgggttgcatggcgttggaatttcggttgtaaatgcgttgtcttcatttttagaggtttatgttaatagggatggaaaaatttttaggcaaactttttcaaaaggtattccaacttctaaagtagaagttgtgggagaatcttctgttacgggaaccaaggttacttttttagcagattctgaaatttttgaaaccttagattataatttcgatgttcttgaaaaaaggcttaaagagcttgcttttttaaacgataaaatatacattacaattgaagataaaagagctggtaaagaaaaatcttcaaagttttattttgaaggtgggataaagtcttttgtagattatttaactaatgacagtaaagcttttcaatcagaatcttattatattgatggttttattaatgatgttattgttaatgtaggtcttaaatggactgaaagttattctgacaatattctttcttttgttaataatattaatacaagagaaggggggacccatgttatggggtttagaagtggccttactaaggctatgaacgaagcttttaaaaattcaaaaataagtaaaaaagatattccaaatcttacgggagatgattttaaagagggacttacagctgttatttctgttaaagttccagaacctcaatttgaaggtcaaacaaagagtaagcttggtaattctgagataaagaaaatagttgagattattgtatatgagcatttattagaaattattagttcaaatcccttagagatagacattattcttgaaaaagcaataagagccgctcgtgctcgtgaggctgcaagaaaagcaagagaatcagaaagaaaaaaaaatgcatttgaaagcttggcattgcccggaaaattggctgattgtgcttctaaaaacccctcagaaagagagatctatattgtagaaggtgattctgctggaggaagtgccaaaatgggtagaaatagattttttcaggccattttaccattgtggggtaaaatgcttaatgttgagaaaacaagagaagataaggtaattaccaatgacaagcttattcctataattgcatctcttggcgcaggagttggcaaaacttttgatattacaaaacttcgttaccacaaggttattattatggcagatgctgatgttgatggatctcatattagaactttgcttttagcttttttctttagatatatgagagatttaattgaaaatggctatatatatatagcaatgcctcctctttataaaataaagtatgataatcgtatttattatttttatgacgagaaagaaaaagaaaaatttttagattctattgaaactaaaaatcgcaataatatttttcttcaaagatataaaggtctcggggagatgaatccaacgcagctttgggaaacgactatggatcctgctagaagaaaaatgagattgataaatatagatgatgctattgaggctgaaaaaatttttgttactcttatgggagatttagttgagcctagaaaagaatttattgaacagaatgcactcaatgtaattaatcttgatgtg

SEQ ID NO: 547 - DNA, 1758 bp, Borrelia garinii
atgtttaaagttatcaaatgtaatgaattgaatgaaaaattgataaacaaaaaagttgaaataaatgcttgggtgaaaaaaatcagacaccacggaaaatttatctttctaaatataagagatagatatgaaaaagctcaagttctgataaccgaagaacaccttttaaagatagcagaaaaaataaaacttgaatattgcattaaaattcaaggattattaagtaaaaggcctcccaacatgataaacgaaaatatgaaaacaggatcttttgaaatattggcaaaaaacattgaaattatctcaaagtgtaatgaattgccatttatgatagaagatgacaataatgcaagtgaaaactcaaagcttaaatatagatacttagatttaagaagagattcattaaaaaataaaatcattttaagatgtcaggctactcatcttattagaaattttttagtaaaaaaaaaatttctagaactagaaaccccaacttttgtcaaatcaacaccagaaggcgcaagagactttgtaatcccatcaaggattcataaaggatctttttatgctttgcctcaatctccacaactttacaaacagcttataatgatagcaggatttgataaatactttcaaatcgcccgttgctatagagacgaagattcaagaggagataggcaaccagagttcactcagctcgatcttgaaatgagctttgtcaaaaaagaaaacattttcaaattaatagaaaatatgctttttttaatatttaaaaattgccttaatattaaattacctaaaaaattcaaaaaaataacatacaaaacggcaatgaataaatatgggagcgataaaccagacactagatttgaacttacattgcaagatataagtcgcaatctaaaaaattcagaattcaatgtattcaaagagactctaaaaaacaaaggttcaattaaaattttaatagtaaaagatgaagctgataagttttcaagagcaaaaataaataatttagaagaaattgcaaagctttacaaaacacaagggctttattttgcaaaaattgaaaacaacaaattttctggaggaattgcaaaatttttaaaaacagaagaacagcaattaataaaaacctattctctagaaaataatgatataattttctttacagctaataaaaaatgggaaactgcttgcaaagcaatgggccaaattagaataaaaattgcaaacgatcttggactaatagatgaaaataaatttgaatttctatgggtctacgactttccactatttgaatatgatgaaaatacaaaaacttatacgccagctcaccacatgttctcgcttcctaaaaagagatatattgccagtttagaaaaaatcccaaataaaaccataggtgaaatttatgatcttgttttaaatggtgtagagcttggttcaggttcaattagaatacacaacaaagaacttcaacaaagaattttcaacataataggatttcaaaaagaaaaatcagaagatagatttggattttttctaaaagcattagaatatggcgcccctaatcatggtggcattgcaattggtattgatagactaataatgctaatgacaaaatcaacttcaataaaagatgtaatattatttcccaagaattcttttgcgacaagtcctcttgatgactccccctctaaaatttccaatgaacaactaaaagaactcggaataaatattgttactgatgatgct

SEQ ID NO: 548 - DNA, 687 bp, Borrelia garinii
atgaaaacaatagatcatgaattttattatgaatttagggtagctgatgatgttagaatgatttatactaaaaagccttttcatctaaatttaagagaacttaataatgataatttaaattttgttcctaagtctaagaaaataaaatatttaaagcaattgcatacagatattatttatagggctgaagatgattttataaatttccaagaaggagatgggcttatatctagttctttagatgtagctcttgttgcttactttgcagattgtcttccaatatacttttatgattcagcgaaaaaaatcgtaggacttattcacagtggatataaaggaagctttagtttgattattttgaaaatgttgtttatgtttgagaaaatgggatcaacttttaaagatttaaaaattgtttttggaccttataacagatcttgttgttatgaagtttctgaaattttcttgaaagaagtaggtaataaatttagcaaaggcttattaaatactgtttttgacataagagatggtaaaatatactttgataatgctagttttaatttaaatttactttctagttttaatttaaatatttataattcaaaactttgtacgcattgtttgaaaaatctttattcttatagaagattaagagaaggacaaagttatgctttaatttggagaatt

SEQ ID NO: 549 - DNA, 1281 bp, Borrelia garinii
atgtatagttatattgtagaaggtggttttaagataggtggtcaaattacagctagcggcaataagaattctgctttaccttgtattttagcggctttacttaccaatgaagatgttattttagaaaatattcctaatattaatgatgtaaaagttgttttagatattttaagtgatataggagcagatattgtaagagagggaaatgctttaaaaataaaagtttcaaatattgtgaaaacagaaatagattcctcttttacggatttaattagggcttccatacttttattaggaccttttgtctctagatttggggaaatagatatggcgcttccaggaggagatgtgattggaaaaaggcggcttgatactcatttttatggcctttctaaactaggagctaagttaatcaacaaagatggaagaattgttttaaaggccaaaaagcttgttggagctgaaatgtttttagatgaagcttctgttacagctacagaaaatatcattatggcttcagttcttgccgaagggaatactgttattatgaacgctgcttgtgagccacatgttcaagatttatgtaatatgttgaattcaatgggtgctaatattttagggattggttcaaatgttttagaaataaagggtgtaaaaaaattaagaggaaccacatttagaataggtgccgacttcatgcaagttggttctttgattagtcttgctgcattaacagggggtgaattggaaattaaaaaagcagatccccaacatttcagattaattagacatatatattcaaggcttggtattaattttgaatatgacaaggaaaatgtatacgtaagagataaacaagagttaaaggttaagctagattttggcggacacattccaaaaattgatgatggtccatggcccgcctttccgacagaccttatgagtattattatagtcactgcaactcaagtagaaggcacagttcttgtttttgaaaaaatgtttgaatccaggatgttttttgtagacaaattaataaaaatgggggctcaaattgtactctgtgatccacaccgtgtagtagttactggcaaatctcctcttaaaggcaatgttttatcttctccagatgtgcgggcaggaatgtctcttcttattgctgcttttgttgctgaaggtcgcagcgagattcaaaatgtttatcaaattgaaaggggatacgaagatgtagctaataaattaattaatttgggggcaaaaattaagaaagttaaaagtcaa

SEQ ID NO: 550 - DNA, 627 bp, Borrelia garinii
atggaaagaaaagttttttctaaagatgggaaagagatcggtactataaatttggatgatagagtttttaatatagaaattagtcatgggtctatttataatgctataaaaaatgagttgtctaatcttagggttggaacatcttcaactaaaaccagatcagaggttaggggtagttctaaaaagccttggaagcaaaaaggaactggcagggctagagtgggtacaaagcgaaatccaatttggattggcggaggtatagcattaggtccaaaacccagagattatagctatagattgcctaaaaaggtaaaaaggcttgcatttaagtctgtattaagtttacgtgctgctgatgaaaataattttaaggttgttgagaattttaatattgaatcaggtaaaacaaaagatcttgctttaataatcaagaattttgcgagtttcaatggtaaggtagtcattcttttgggcaatgatgatcagatgattaaaagggctggtaaaaatataagagatttaaagattttgtcttttaataaacttagagttgttgatttgttttatgctaagaatttaatagccctggaatctgctgttaacaagcttaatgagttttatgttaaa

SEQ ID NO: 551 - DNA, 6486 bp, Borrelia garinii
atgatagattttgctactattttagttaacctttttttggtttcaatagttttgtttatttataggcaatatgacaagcgttctagggcgttagataaaattaaaaagttcatcgatcttgtgaaggttaatcttgaagattttattgaagataagacaaaagagattaatgatcttgctgttgatatggaagcttatcaaagatctagtatagaaataataaaaaagattgatgaagttcagccaaagattaaaaacaaaagcaatgattttgcagaggttgaaaaaaagatagcttatcatgattctatgctcaaggatcttgatgaaatgaccttgaaagttcaagagaatattcaaaggttgcaagttgatgggaaaatagtagataaactttcaaaaactttaaaaggatttaatactcagattgattctgttgaatcaaatttgaattcagtgttagaaaaatttgaaaagtccaataaagaaaatctcgagtctattaaaattgctagttgggaaaagtttgatattaatattaaggaccttgtttttaaaatggataatttaaacagagagattgatctttatgaaaaagatttagcaaatattgaagagagaaaaaaggatattttagataagggtaatgagaaattagatttagaatttaatgattttcttgaaaaggttgaatttaatattggtaaatataataaagagatagaaagttcttttattttttatgaaaacaaatataagttaatagaagattctatagagcttattatggagagcgtaaagaataaaattaatgagaaagaagattttattttaaatagactgaatgaggaattagaaaataaatttaaagatatcttcacatacgttgatgatcgttctagggaaattcaagataaacttgaggataaattgattttagtggacaatgaaatttcttctatgagttcttctttcaaggacaatgtttattcaagaattaattcacttgaggagtcaatacgaatagagatgggaaagtatgaggagcaggttgatgatgtttttgataaatttagatctcaagttgaactgaatcttaaaaatatttatgaggactatgaagataaaataagccaagttgataagaatattagagaaagggtagagcttagtttgttagatttgaattctaaaatggaaagtgttcaaacaggtgccatctctttgatcaagagacttgaagatgattctaatcgaatatatcttgaatttaaaaataagtttgagtcagacattgaaatatttagtgaaagttttaaagatgatattaatcaacttaaaaggcaattagaatctcaacttttagatgttgattcaaatatgcaagaaaagcttattaagcttaatgataatttgatttctaattttcaagaaattgatggcaggtttaataataattattcaaatttaactgataatataaattccaagtatattactctttttgaatctttagattctagtagctctaaatttgaagatcaaatggaatctaaatataaaggctttaaagataaattaacggcagaaatggatgagttttctttagtttatagtgagaaatttgacacgctctctcaagaagcaattaataattatcaagaatttcaagatttaaacaagaaattagaaaatgaaattgaatctttgtgtaatatgtttgaagaaaaccaagagattttaaagagagattttaataccaatttaattaatattaaagatgaaattgataaaaatatagtagagtttaaggatcgttattccgatgaggtaaataattttgttagtaagctagaagaaagtaagcttcaatattcaaagtggcaaggtgatatggattctaatttaaaaaatattgaatctcaaataaataaaacaaatgaagaatttttaagtttaattcagattcaaaaagacaagggaatagaacttagtgaaaatgtttttaatgatctttcagatcatattcaaaagaaagctattgacattcatggtagttggaaagatgagcttattgctttaaataaatcattgcttgatattaagatttctagtgaagagctactttcatctgctactttaaaaatagaaaatctagaaagagatgttaacgatagaatagaatatgttttgttaaaaacaggcgatattgagagtttagtgatagaaaaatataaagaattaaaagatatgtcatattcacaaagtgacgaggctatattaggaattaaagaatttattaataggcaaacagaaataattaaagataaaagcgtatttatgcttgaggatttgaataaaaaatttgatgataagaataattttgttataagtaagattgaagaatgtgattataaattaaaagatttcaagagtgaatcagaagatattttaaataattttaaatctgatcttaatgaatttattgaatcaaagctacaaattgtctctaatataaaatcggacaatcaaaagcaaattgatgattttttagatagaatttctaaagatattttaaataggaaagattcaattaacaatgaagtagacagtaagcttaatgattggcaaagcaaattaaacgaaataactgttaaaattgagaatttattatcttcgggtaaagtggatttggatttaatagattctgaggtgactacaaaaattaaagagcttaaattttccatagaaagccttgagagttattaccttgaaaaaatagatgagtttagaaatcaaggtgctatatattctgacgagcttttacaagatataatgaaccattttaataaagagactagagaacttgaggaaaatttgtcaaaaaagtttgctgtagttttaaataattcagaggaatttgttaaagaggttgatagcttgctgcaggataaaagaaccgatattgcgtcttttcaggccaatatagatattactcttgattcccttagtgtaaagtttaatgatataaataaagaaattaatggaaaatataatgaggtgatatctaattatagagggtattcagaaaatatttctagtaaacttgaaaatgaaataatgcatgagattgaaaatataaatagaagattgacagatagaatagataatcttagcaaaggtatggatgaaaatcttcaaaaacttaaggaatcttttgatgtatcaaaatatcaagttgaaaaatttgaattaaaagttaaagatctaacagactctggagaggcaaaaattagtgagtttattaaagagattgaacagtattataaatctagattagaggaagcaattgattataggagaacgattgatagtgatattatgcaagcaaaagagagatttggagagataacaaatgatcttaaaaataatattgagagtaagtctgagtttttaaacgatctttataaggaaagatttaaacttattgagagtaattttgaagagaggtattctacgtttttaattgaaagtgaaggagctatttcaaaaattagagatgaaatttataaaacacttacaataaatgatgaaaatttgcaaattaagatttctgaaatggatcataattttgagataatagagcaaagatcaaaagatattttagagtttgaaaaagaattgagagataaaattcaagattgttacggtattataaattctcaatttggagagattaagggaagtgttgaagagaatataaaaaatcattttgaggtttgtataaaaaaggtcaacactttaattgatgatgacattgtaaagtatgaaaatgaaattcataagagaatcgattctttaaaatcgattgaaaatacttttgatagcatagagaaaaatttgaatgataaagtgaatgggtgcattgataaaatatccaatgattttaatcttaagtatattgaacttgaagaaaggtgtaatgaagggcaattaaatttggagagtaaaattgacaataaaattaaagccattgataatttagctttaagtcaatatgatgggcttgagaaaaagtatgctgatatgtacgatgagtttttagagagattaaattctcatattgcaactttaagtgaagagtttaagcattcaaataaagagatgatttttgaacttgaatctcaactgaaaaatcttaaaaatcttgaatctgatttaaataatgttgaaaaggatgttattagattgaaagaagagtcttatcataatgtttcatctcatcttaagctattagaagaagatttttttaaagatttgaaaattagaggtgaagagcttaaatattctttagaaaactttattgcttcgcataatgataaaattcaaaatttagaatatgatttgtctaaaaatctagaaaataaaacagaacttattcaaagtttccgcctagatattgaacaaaaaatgaaaaatgataaagaaactttttatttagattttactaaggaattttcttctaaaaaaaaagatatggagagtgagatagctttaatggaaactaatattactgaaaggatagatgaatttattgattttgtaaataataggcaaaatattattgattcttggtttttaaatattaaagatgatgtaaaaaattggcaagaaaaatcttatagtgcaatagaaaagaaaataagtcttgctgaacttgaaattaaatcatttgagaatgatattcttaatgttaagattggtttagaatcttttaaagatagttttgagattaaggctgaagagatttttggcaatttgcaaagcgaggctaaaaaatttgaacaatcagttaatcttgattttaaaaatattggtgagtcattaaatcttaaagttttagatcttgaaaaatttgttgattttaaagtagaaaagatagacgaaagggttaataagaaaaccgaagacatcttaattcaagcagaagtgaaatttttaactcagcaaaagagccttgaagataggatttttgagcttaatcaaaaattagagaatgagtttacaaccctgtcttctaatcttgataaagtaagacgagaaatgattgatgtaatttctagtgataaaaaaagctttgaaggtcaaattgaattaatgcataaaaatatttcagaattttctgaaaaaattggtttatatagaaataatattgagacatcaattgagaatgaatataatgcgttttctaaatctataaaatcagagtttggcttacttgaagacgagcttaaaaaaaatttaaaacattcaacgttggagattgaaactgtaaagaatgatttgcaagaacaaattgataaatttgaggttgagttcaagaaaaatcataaaaaattattgaaagaagttgatactaatattttagaacttgaatctaaaatattaaattgtgatactgaatttaataaatttattagtgaatctaaagacaatttggttgaatataaatctgatttgagaaaagaatttgaagatagttatgataaaataaattttcaaattgaaaattttaagaaactagatgctgagcttgaaaaaaataattcgatatttttagaggcttattctcttaaggagaagttggaaaaattatgggaaactttaaaaaatgagataaatcttgctcaagaatataaaaataattttgaaaatgttaacaaggaattctataatattcaaaaagaaacattaggtattattgaaacttttaatgagttgaagttagaacaagaatctattaaagctattaagaatgattttaatagattttttgaattttactcttcatttgatagtagatataagagtttaatcgaatcttatgatgaaatgcaaatttataaagccaaaataaaagaaatagctgatgagcagagaaatattcttgataattatgaaagaattagcaataaagagggtatattaaagagtactatagagtccgttgataaaaactttgatttaataaatgaaatggagaagagatttaataatttaagtaaagagagtgctaattttcagaacaatctaaaggatatggaaaatgttgtttcgaatctcttattaaacaaagggctttcagaagaagtattgattaatgctcagaatttaaaggaaatgctcttagatattgaaaataggttaaaaaatactttaactatgagagaaaaggtagtgaaatctgaaacaaggctagagaatttaaatattgcggcagaagaaagaataaaaactcttggtattcttgtcaaaacagattctaaatatcaagataatgttggtcttaataatgaaactgttaggaattctgtaataaaattaatgagacagggatggagtgctgaagaaatttctagagctactaaattatctattggggaagttgagcttattttagagcttggtataagcaataaaggtgat

SEQ ID NO: 552 - DNA, 1905 bp, Borrelia garinii
atgggcaaaataataggtattgacctaggaacaacaaactcatgcgtagctataatggagcatggaaaaccagttgtaatacaaaattcagagggtggaagaactactccatctattgttgcttacacaaataaaggcgaaaggcttgtggggcaagtcgcaaaaaaccaaatggttacaaaccctgaaaacacaatttattctattaaaagatttatgggaagaagatttgaagaggttgcaagcgaaataaaaatggttccttataaaatagaaaagggactaaatggcgatgcaagagtaaacatttccaatataaaaaagcaaatgtcaccgcctgaaatctcagcagcaacccttacaaaaatgaaagaaacagcagaagcttacttgggtgaaaaagttacagaagctgttattacagttcctgcgtattttaacgatgctcaaagacaagcgacaaaagatgctggtaaaatagccggccttgaagtaaaaagaattgttaacgaaccaactgccgctgctcttgcttatggaattgaaaaaaaacacgaagagattgttgctgtttacgatcttggtggaggaacatttgatatttcaatattggagcttggagatggtgtttttgaagtgaagtcaaccaatggagacacacatcttgggggagacaattttgacgatgagataataaagcatttaatttcagaatttaaaaaagaaagcgctattgatttgtcaaacgacaaaatggctcttcaaagactcaaagaagcagctgaaaaagctaaaatagaactttcaggcgctcaagaagcttcaataaatcttccatttattacagcagatgcaaacggcccaaaacacttgcaatatactctaacaagagcaaaattcgaacaaatggtagaccacttagttcaaaaaacaaaagaaccatgccttaaagctattaaagatgcagggcttaaagcctctgacattaacgaagtaatacttgtaggcggatcaacaagaattcctgctattcaaaaaattgtaaaagatatatttggacaagatcccaacaaaggagtaaatccagatgaagccgtagcaattggagctgctattcaaggtggtattttaaccggagaaaccaaagacatggtactccttgacgttactccactctcactaggaatagaaactctaggtggtgtaatgactaaacttattgaacgaaacactacaattcctacaaaaaaaagtcaagtattctcaacagctgctgataatcaaacctctgttgatattaaagtccttcaaggtgaacgtgaaatggcagcacaaaatagaatacttggtaactttatacttgatggaataccagcagcaccaagaggagtacctcaaattgaagtaagctttgacattgatgctaatggaatagttcacgtatccgcaaaagatatgggaacaggcaaagaacagaaaattagaattgaatcatcatcaggactctctgaatcagaaatagatcgaatggtaaaagatgcagaagctcatgcggaagaagataaaaaattaaaagaaaatattgaggcaaaaaatacagctaattctttaatttatcaaacagaaaaatcattaaaagaatattctgaaaaaatttcaagcgaagacaaagaagctattgaaaataaaataaaagaattaaaagaaagtcttgataaagaagacatttcacttataaaatctagaacagaagaacttcaaaaagcttcttacaagatagctgagatgatgtataaagattcttcacagcaaaatgcaagcaaccaacaagaaaatggtacccaaagcaatacaagcgaagaagggaaagaggctgattacgaagttgttgacgaggataaaaaa

SEQ ID NO: 553 - DNA, 561 bp, Borrelia garinii
atggaaaaaaaagaaactaaaaacgatgccgaaaaaaacaacaaacaagataacaaaagtacaaaatctcaaaaaaaagaaaacttaaatttggtaaattctgataaaaaaattaccgagcttgaaaatgaaatctccaatcttaaagatttgtatttaagaaaacaagcagaatttgaaaacttcagaaaaagattagaaaaagaaaaagacaattttgttaaatttgcaaatgaaaccataatgaaagatgttgttaattttcttgataacctagaacgagctattaactcttcaagaaaatctaaagattttgacaacctattaacaggaatcagtatgattgaaaatgaaatactatcaatctttgataaaaaatataatttaaaaaaatttggagaaaatggcgaaaattttgatccaagtcgtcatgaagcaataagtattgaagagaaagaagatcttaaaaatccagaaatagtagaagtataccaaaaaggatattgctacaacgacagaatattaagaacagcaaaagttaaagttgctcaaagtaaaaat

SEQ ID NO: 554 - DNA, 681 bp, Borrelia garinii
atgaaagatttgaatgaaaacaatgataataataaaggattttttgtagcattaacctcgattgcaacagtttgtatcataatatttcttgggacaattattttctttccaaacaaaaatttggcctcagatattgcagagaagaatattgttttagaagaagccaaagatcaaaacattttagaaaatattgacgaaaatgaaaaatctttaaaggtatctgaaactccaaatgaaataataatagatttaacacaagatttaaataaagaaaaaaaacttacaagtaaaacccctaatacttctcaaaaatcaaaacctattgaaaaatctcaacccgtagctaaaaaaatacctaatacttctcaaaaatcaaaacctattgaaaaatctcaacccatagctaaaaaagctttagatattgatagcgtatatgaccctaatacagaatattacatacaattcgtatcactctcagacccaatcaatgcagacaactatattcaaaaattactcaaatataatatagttgccaaaatatattctgcaacagtagataataaagatatttacagggtaagatctggtccttataaaacgaaatcagaagcaaaagcagactttaaaaaaataacaggaataagtgaatttaaagaaacttatatattacccgttaacaaa

SEQ ID NO: 555 - DNA, 1485 bp, Borrelia garinii
atgaataaaacaaaaaatcaaagctttaaatattttataatgcttttatgtatatcattatttggggctaataatacaataaattactctagcattgaaattcccttagaagacttaagtgaagaatttaaagacactgggaataaaaacgatcaaataaatacctcaaaacatttaaacaaaaaaatagtttcttataaagaccccaaaaagggtaaagagctaaaattgccagaaaatataagagacgaaaaattgttaaaaaaaagaatggatgaaaatgatctaaaatctataatcgaaaattatgaaaataaaattaaaaatatagaaaagcttttaaaagctaaaaatcaaaaagcatcgtcaaatgaaaataaaaaaatagaatcaatcgaaaaaaaagcaaaaaaatatgaaattttaaccaacaaattaaaaaacgaaataacagaaataaaaaagctccttaacaagaggtccaaacctaaagaagatgaaaattatgaaaaaataaatattgaaaacattgatgatgatgatgatgattttgaagaaaattatgaatataatgatgaaattgaagaaataaatgaggacaagtacccttctaatgaaggaataataaatagcctaaaagaaaaccttcatgcaaatgaaaaatattatgctattaatgaaaaaaaaatcgatgaacttgaagacagaattaatgataatgaaaatactattttagacttgcaaagagaattaagaaattttaaaaaaaaagataactcagataaaaacttagaagaaattgaagagaacttatcttcaataggaagaataattaatgacttaaaagaaaaaattagcgcaaatgaagcaataaataaagaaaatcaaaaaaaaataagaaccgataaacataaactcaaagaattagaagataaaataaaggaaaatgaagagactattttgaaacttcaaaaagaattaaacaattttaaaaaaaaagaaatttctcaaaaatcttcaaacgaagagacttttattccaagtattacaaacaaaaatgacgagctagaagaaagtaataaattagaaaagaaatattttaagcctatagaaaaaaatgaaagcgaagatctagaagaaaaagccaaaaacactaaaaaaacaactatgatcaaaacagcaaattttcaagtctaccctgacatatacattaataactataaattcaaggaaaaaggggatcaatttgcatttaaaaaagaaaacacatactatattgaaatagatccaaccaataatttaaatgaagctctaaaaaatcatgaaataatctcaaaatataaatttgaaaaatatttcattaatcctactctaaaaaataaagaagaattttttaggaacttaatagaagttaaaaatatccatgaactaggaattatgtataaaagcctaaagcctaaatttaagcaaataaaaataattaaa

SEQ ID NO: 556 - DNA, 1848 bp, Borrelia garinii
atgaaaaaacaatttgatacagaagtaaatgatttgctctatttaatcattcactctctttactcccataaggaaatattcttaagagaattgatatcaaatgcatctgatgccattgataaactcaagtttttaagcttgacaaatgaaaaattcaaaaacatcgccctagaaccaaaaatagaaataacatttgatgataaaagtatcctaattaaggataatggaatcggaatgaatgaacaagacttaactaatcatcttggtgtaattgcaaaatcaggaactaaagaattcattaacaatttaaaacaagatgaaaaaaaatctgcaagtctaattggccaatttggagttggattttacagtgcattcatagtatcagaaaaagtagaagttacatcaaaaaaagcactagaaagcgatgcttatatttggttcagcgatgggaaaacaggatatgaaatagaaaaagcaaaaaaagaagagtcgggcacagaaataaagctttatctcaataaagaagggcttgagtatgctaataaatggaaaattcaagaaattattaaaaaatattcaaatcacataaattatcccatttatataaaatacagcgaacctataatgaaggacgggaaacaagagggaatagaagaaaaagaagagaaattaaatgaaaccactgctctttggacaaaaaataaaagcgaaattaaagcagaagaatacaatgaattttataaaaatacaacctttgattatgaaaatccattgatgcatgttcatacaaaagctgaaggaaatttagaatatactaatttattttatatcccaagtaaagctccttatgatttatattatccaaacaccaaacctggagtaaagctatttataaatagaatctttattacagactctgaaggtagtttgcttccaaactatctaaggtttataaaaggaattatagactgccaagatttaccgctcaatgtaagtagagaaattttacaacaaaataaaattttgtctaaaataaaatcatcttctgtaaaaaaaatactaagcgagcttgaaaagctaagcaaaaaaaatcctgaaaaattttcaaagttttctaaagaatttgggagatgtattaaagaaggtgtttattctgactttgaaaacagagaaaagcttatctcattaataagatttaaatcttcaagcgtagatggatttgtgtcttttaaagagtacaaagaaagaatgaaggaaagccaaaaaagcatttactatataacagggggtaaagaaaatatattaaaagaaaatccaatagtaagcgcttataaagaaaaaggatttgaaatcctaatcatggacgatgaacttgatgaggctattttaaatctaattccagaatacgaaggattaaaactaaaagcaataaacaaaaatgaaactagcaatgaattaaaagatgaaaatttcaaaaaaattgaagaagagttcaaagatatacttacaaaagtaaaagaaatccttaaggaccacataaaagaagttaatctctcagcaacattgataaaagagccttcggcaataatagttgacagcaatgatccaacttaccaaatgcaaaaaatcatgctatcaatgggacaagaagtaaaagaaattaaaccaatacttgaactaaaccctaataataaaatagtccaaaatttaaaaaatctagagtctgaaaaattagaaaaaataagcattctcctattcgaagaggctctgctaacttcaggaatgcctagcaaaaatccaggaaaattcataaacataataaacgaattcctagaaaaagagttgtta

SEQ ID NO: 557 - DNA, 687 bp, Borrelia garinii
atgcttgaaataataagtcttgggggaggagtaataaattcaaatcaaatcaacatagaattcattaaaaatttcaaaaactttgtttttaaatggttactagaaaatgaaaaaagaaaaatcattttaatagttggtggaggaaaagttgcaagagaataccaagacgcctataaaaaaatcaaccctgattttaaagttcgtgagcttgatgagattgggataatgtcaacaaggttaaatgcagaatttctctgcaaagtgatgaatcccctttgtaaagacaaaattgtcaccaatcccttaaaaaatttttcttttaagggtaaaatattaattgcttccggatggaaatcgggattttcaacggattacattgctgtaaaatttgcagaaaaatttaataaaaaagatgtcataaatataacaaatgtaaatcaagtttatgataaagatccaaaaaaatttaaaaacgcaacagcttttaaaaaattaaattggaaacaattacaaaacattgtaggacaaaagtggaatccgggcttaaatttaccttttgacccaatagcaacaaagctctcttcaaaacttggacttactctttatatagtaaacggaaataatattgaaaacttagaaaaagttttcaacaaaaataatgattttttgggtactgttatagtaaaa

SEQ ID NO: 558 - DNA, 3441 bp, Borrelia garinii
atgagttttaaggctaaatttattcatcttcatgttcattcagattattctcttttggatggagctgcaaaaatatcagatattatatcaaaagcaaaaaaatgcaatatgtcacatattgcattaacagatcatggtaatctttttggagctattaaattttataaagaagctaaaaaagcaggaataaagccaataattggcattgaagcttatatggcaaaaacttctaagttttttaaaaaacatgatgatcttgggaaaatgtcttatcatttaattttgcttgccaagaatgagataggttataaaaacttattaaagttaacaagtatttcttatcttgaggggttttattatcgtccaaggatagataaagaggatcttgaaaaatattcagaaggtttaatttgtacttcagcttgcattggaggactcattccaagacttattttggggaatagatttgaagatgctaagaatgaaattctttggtttaaaaaagtttttggcaacgatttttatcttgagcttcaaaggcatggcattaaagatcaagacattgtgaatgaaagacttgttgaatattctagagaacttggagttcctttaacggcagctaatgattctcattatgttaatagagaggatgcaattgctcaagacatcattgtttgtattggtactggtgccaagaagagcgatgagaatagattgaaaatggaaaccaatgaattttatattaaatctcaagaggaaatgtgtgaactttttaatgatttgcctgaagctttagaaaatactgtaaggattgcagaaaaatgtgatgattttaaaataacttttccaggacctattttgcctgattatcaaattcctattgaatttaatactcttggtgaatatttagaatatcttactcttgaggggttaaagtttagatataaaactttgacaagcaaaataaaagatagagctttttatgaattaagtgtaataattaggatgggctttgaaggctattttttgattgtttgggattttattaaatttgctcatgataacgatattcctgttggagctggtcgtggttctggtgctggttcaattgtagcttatgctcttaggattacggatattgatcctttaaagtataatttgctttttgagagatttttaaatcctgagcgtatttctatgcctgattttgatattgatttttgtttcgaaggcagagatgagatcataaaatatgttaccaataaatacggagaagataaggtagctcaaataattacttttggaaccttaaagcccaaggctgtagttaaagatgtagctagagttttagatattccatttgccgaatcgaatgaacttactaagcttattcccgatggtcccaaagtttctttaaaagaggttttagatgacaattctttgaaagagtattttactagcaagcctgtttataaagaattaatggatgctgcattggttcttgaaggaatgaatagacatgcttcaactcatgctgcaggaattgtaatttctaaaacccctttaaccgattatgtgcctctttataaggattataagcaaggctctgtttctactcaatacacaatggatttgcttgaagaatgtggacttgttaagatggattttcttggcctaaaaacattaactttaataaaaaatgcagaaaatcttattagaagtgtaaatccagattttaaaataaaaaatattccagataatgatgttaagacttttaagatgctaggagaaggaaaaagcgcttctgtttttcagttcgaatctgagggaatgcagcaaattctaaaagacgcaaagcccgataatattgaagatttaatagccttaaatgctctttataggccaggtcctatgcaatttattcctcaatttattgctgccaaaaaaggcgtaaagagtattaagtatcctcatccagatttaaaggaagttttaaagccaacttatggagttattgtttatcaagaacaagtaatggaagtcgcaaaaataattggaggtttttctcttggcaaggctgatattttaagacgtgctatgggaaaaaagaaagaagatgagatggatgaaatgaaggtcgattttttaagaggtgctattgagaaagggtatgacaaagaggttgctagtgaaatttttgaacttttaaagcccttttcggggtatggatttaataaatcgcatgcagcagcatattctttaatagcgtatcaaactgcttatcttaaggctaattatcctcagtattttatggctgctaacttgacaaatgaaattaataataatgataagctttcttattatatcgaggagtcaaaagctataggtataaatgtgctcaagcctgatataaatcgatcatttaaagaatttcgtgtaactgattctggaatttcctatgggcttaatgcgattaaaaatcttggagaaattgttgttgatttaataattgatgagagagaaaaaaacggcaaatatagttcttttgagaattttatcagacgtgtagacgataaagtaattaataagaaatttttagaatctgcaataaaatctggactttttgacagtttggatcaaaatagaaaaactttatttgaaaatcttgatcgtttgattgaagttgtttcagaagataaaaataataaaaaacttggtcaaaatagtttgtttgatgtccttaaaggtcaaaacccaatccatcaaaatttcaattatcaggctttcaaagaatattcttattctgagcttttagaatttgaaaaagagcttttaggattttatgtctcgggccatcctcttgatccttataaaaaggcaattaatagtttttccagtttaaatgttttaaaagatcttgctaccaaaaaagatagcattgttcaattttctggcattttaaattcagtaaaagttattcaaaccaaaagaaataatgcaaaaatggcttttggagtcattgaagattttaaaggtgcaatagatattgtagtttttacagaaagctatgaaaggtatagggattttttatttgaaagcaatgttattggggttataggtagacttacgtttaacagagacaaattttcgattgtagttgaaaaagttgtaaatattgagagactctctgaagataaagtaaagaatattcatattaaatttttgaataataaattaaatgacttgcaattacttaattctttaaaggaaagtataagtaattttgaggacaattctggattttcaaatgtttatttttatttaagggaaaatggcaaggatttaaaattaaaaatgaattcaattttgaattttgtgccagatgaagacaagcttgataaattgaggcggtgtatgatagttgaagatgtttgggttgat

SEQ ID NO: 559 - DNA, 792 bp, Borrelia garinii
atgaacaattttttaagaaaattttttctttttttattagttttttcaaacggctatgttgctttttctaaaaacatcaatgttttaatagtaactgccatggattctgagctcgaagagataaacaagctgatgtctaataaggaagaaatagtacttaaggaatatggtcttaataaaaagattgtaaagggtaagttgtctaatcgcaatgttatggctattgtttgtggggttggcaaggttaatgcaggtgtgtggactagctatattttgtcaaaatacaatatcagtcatgtaattaattatggagttgctggtggcgttattagtgataaatacaaagatattaaagtgggagatatagtagtgtcttcagagattgcatatcatgatgttgatttaactaaatttggttataagatgggacagcttatgggattacctcaaaaatttattgccaataaaaatttggttaacaaagctaaagaggccgttaaattaaaggttagaggctctaatgcatattcaggattaatattaacaggagatcagtttattgacccaatttatatcaaaaaaattataagagactttaaagatgtaatagctgttgagatggaaggtgcagcaatagggcatgttgctcatatgttgaatgtaccttttgtagttattaggtccatatctgacattgtaaataaagaagaaaatgaggttgaatatagtaaatttttaaaattagcttcttttaattcagctaaagttgtacaagaaattttaagaattctt

SEQ ID NO: 560 - DNA, 1863 bp, Borrelia garinii
atgaaaaatcatattttatataaattaattatatttttaactacatctgtagcaatatttgcagcagcagataaattaaaggaagaagatatatttaaaataaatccatggatacctacatttggaattgaaaacacaagtgagttcagacttgatatggatgagcttgttcctggatttgaaaacaaaagcaaaattactattaaacttaaaccatttgaagttaatcccgaattaggcaaagacgatccattctcagcttacattaaggtagaagatcttgcattaaaagcggaaggtaaaaaaggtgatccatttcaaattgacataggagacataacagcccaaattaatatatacgatttttttattaagataagcactatgacagattttgactttaataaagaatctttatttagttttgcgcctatgaccggattcaaaagcacttactacggatttccaagcaaagacagaatagtaagaggaacaattcttgcaagaggtacttctaaaaacataggaacaattcaaatgggatacaaactcccacaaatagaccttacatttgcaatagggggaacaggaacaggtaacagaaatcaagagaatgacaaagacactccatacaataaaacctataaaggaatactttatggggttcaagcaacatggaagccaattaaaaatctacttgataaaaacgaagataatcgatctgtaattgcagaaacaccttttgaattaaattttggcttatcaggagcttatggaaatgaaacattcaataattcatcaataacatactctttgaaagataaatctgtagttggtaacgatttattgagtccaactttatcaaattctgcaattttagcatcttttggagctcaatataagcttggattaacaaaaatcaacaataaagatatctatcttattttacaaatgggtaccgattttggaatagatcctttcgcaagcgatttttctgtatttggacacatctcaaaagcagcaaattttaaaaaaggaatatccgcagatcctagtaaaaaaaccgaagatatatttgatccaaatggcaatgctcttaatttcagtaaaaatacagagctgggcattgcattttcaacaggagcaagcatagggcttctttggaataaagacgacggtgaaaaagaatcttggaaggttaagggagctgattcctacagtacaagactatttggagaacaagacaaaaaatctggagttgcattaggaataagctatggacaaaatctttacagatccaaggatacagaaaaaagattaaaaaccatatccgaaaatgcatttcaaagcttaaatgttgaaatctcaagctatgaagacaataaaaaaggacttatgaatggaataggatggataacatctatcggtctttatgatattttaagacaaaaatctgtagaaaactatcccacagcaacaaactcagctactgacacaaacaatcaagccggacaaagttcagaaagcacacaagctacaatccctaatctaacatttgaagacgcaatgaaactcggcatagctttatatcttgattatgcaattccaatagaatccatttcaacagaagcatatgtagtaccttatattggagcataccttttagggccttctaataaaatctcaagcgatgctacaaaaatttatttaaagacaggacttagtcttgaaaaactaataagatttacaacaatttctcttggctgggattcaaataacattatagaacttgctaataaaaatacaaataatgctgccattggtagtgctttcttgcaattcaaaatagcctacagcggaagc

SEQ ID NO: 561 - DNA, 1428 bp, Borrelia garinii
atgagtattgtaattgattcttttaaagagatatcaaaaattccaagatgttcaaaaaatgttaaaggaattattaattttattaaggagagatccaaaaaatttggttattcttttaaagaagatagtgttggaaatcttgttgtgcagataaaatccaatagtaatattaatatgcaccctatcattttacaatctcatgttgatatggtttgtgaaaaaaatgaatccagtttacataattttgaaacagatccaattgaaattgttgaagaggatgggtatctaaaaggagtggggactacccttggagctgataatgggattggagtagctatgatgttgagcattatgagtgaggccaatagcttctctcatcctgatttagaacttctttttaccgttgatgaagaaataggcctaataggtgctcttagtcttgattctaagctatgtagtggcaaaagccttattaatcttgatggggaggaagagggttattttttagttggttgtgcgggatcaagacttgttgagattgttttttctcctcagtatagtcttgcaacaaaaaaaacaaaagtagaaattttgcttaaagggcttaaaggcggccattctggagcagatattcatttagatttggcaaattctttaaaattaatgttttttgctcttttcgaaattaaatcaaatattgattttgagattgaaagtatttttggtggagacagcagtaatgcaattccaaatgaagccaaggctttaatctttattaatgatagtgattatgatttattaagtaaagaacttaaacttttcgtatttaaagttaaaagtgtatattctcttgaggatgaatttgacattgttgttaataaaaaagaattttcatcagttaaagttcttgatgaaaatagcaaaagcaagcttttaaatatgggaatgggatttttacatggagttcaaaaagtagaaaattatgaaaataagctcatcaagacttctttaaatttttcaagtcttttcaaaattaaagacgactatatttttacttttttaataagatctttatttgattcagataaagagtatgtttttaatcatttacaatcaataggcggtttatcaggagctaatttgcgtgtaatttatgactatccttcttggaagtctaacaagaatagtaatcttttaaaacatcttaaagaggtgtataaagagatgtatcttgaagatgctaatgtttctttaatacatgcggggcttgaaacaggtataatatcttcgaggttggggggcatagaatctgttactcttgggccttggattgaatcgcctcatactactagagaaagggtaaatatttcttcaactattagagtttatgatttcttgaaaaaaagtttagaaagatttcaaaaattt

SEQ ID NO: 562 - DNA, 1305 bp, Borrelia garinii
ttggtaaaaatttttatggcaagattaaaaggtcaaaaagtaaaagaatgttctttttgtggacttagcgttgctgagcttgggggcaatgttgttatatctaatggagtagcgatttgtcctgaatgttctaaaatatgtcacaatctttttaaagaaaagttgagcaatccgctagattctaaatccaatggtttgccaactcccaaacaacttaaagatcatttagacatgcatgttgttgggcaagaagatgcaaaaaaagttttgtctgtggctgtttataaccattataagagaatattgaaaaataataaatatgataatggcattgaaattgaaaaatccaatatacttttggttgggcccacaggcagtggtaaaactttgcttgcaaaaacgttagctgcagagatgaatgtgccatttgcaatagcagatgctacgactttaacagaagctggatatgttggtgaagatgtagaaaatattttgcttaaattaatacatgctgctcatggggatgttagtctggctgagaaagggattatttatatagacgaaatagataaaattgctaaaaaaaatgaaaacgtttcaataacaagagatgtttctggagaaggggttcagcaggctttgttaaagataattgagggcactattgctaatgttcccccaagaggtggtagaaagcatccttatgaggatactattgaaattaatactcaaaatatactctttatatgtggtggcgcttttgttgggcttgaaaatattgttaagaatcgaataaacaagagttctattgggttttcagcaattgaaaaaaagaatataagagaggacacttcattaaagtatttagaaatggaagatttgattaaatttggcttgataccagagtttgttggtagacttcctgtacattcgtatcttgaaaagttaaataaagaagatttgatgagaatattagttgatcctcaaaattccattattaagcagtattatcatatgtttaaaatggataatgttgaattggtatttgaaaaagatgctttggaatcaattgtagatgaagctattctaaaaaatactggggcaaggggtcttagatctattttagagggtcttcttaaagatgttatgtttgaggttccttcaattagtaagactaagaaggttattgttacaaaagaatctgttttaaatacagatattaacccattaattttggtgggaaatgcaattaaaaagccttgggcaaaagagttatatgaaatcaatcttaaatatgataaaaaa

SEQ ID NO: 563 - DNA, 2406 bp, Borrelia garinii
atgaaatcaatcttaaatatgataaaaaatagaaaagaagatcttccaattgttattttaaaagaaaatgttcttttccctaatattacattgtgggtaacctttgataatgaatatgtaattaattccatagcccaatctatgttagagggaaggttgattctttttgcatatccaaatgaatctaattatgacgaatttggtaaaggagggattaaaaacctatgttctgtaggcacttattctaaacttatccaggttataaaggtcagtaaagacgtagtaaaagttttggttgagtgtcaaagcagagttcttatagacagtgtttcaaaaaaaaatgattatttaagagccaaagttacttttgtgcctgatgttagtggattaaacagagagctttttacttattctaaatttttaaaagaaacttacgaagtttatagaaattctttatctttaaaatcttatgatagtgataatgagccaattgattattttgagaatccaagcaagcttgttgatattatagcttctaattcaaacttagagaatagtataaaattagagcttttgcaagagttaaatgttaaaaccagaatagaaaagttaattgttaatttaaacattgaaattgaccttttagatcttaaaaaagatattaattctaaagttagagctaagctggataaaggacaaagagattattttctttctgagcaagttaaagagatacaaaaaagattaggtaaagatgagaacgactatattgacagattaaattccaaagatatttcagaagatgttaaatctaagattgaaaaagaaatttctagattatctaaaatgcagatgaattctcccgatgctaatattattagaagctatatagaattaatattagatcttccttggaatgaaaatactcttatgaaaaatcatttaagcgagattgagtttatcttaagaaattctcattatggtatggatgaagcaaaagaaaagataataaattttttagctgtttatcaaattaattctaaggttaaagctcctattttatgccttgtaggacctcccggtattggcaaaacatctcttgtagaatctgttgcaagatcgttgtctagagaatttgttaaaatatctctaggtggcttaagagatgaggcagaaattaggggacacagaagaacctatgttggttctcttccaggtgtttttattagtgcaatgaaaagagcaggcaaatctaatcccgttattcttctcgatgaaatagataaaattaataatagttataaaggaaatcccgaatctgcccttttagaagttttagatcccgagcaaaattataaatttatagatcattatttagaaattccttatgatctttctaatgttttatttgttacaacagccaattctcttaatagtatgtcaaagccacttcttgataggatggaaataattaaagttgagggttattcttatattgaaaagttagagattgctaagatttttttgattccaagcataattaaagagagttttttagacaaagtttatataagaatagaagacgaggttatttttaatttaattagaaagtatactatggaatctggtgtaaggggactaaagagagttttaactaatttaattagaaaactcgtaagggagctgctttataagtattctaaagatcaaatcatcaaaggcaatttttattcaccaagttctttaatacatggaaacaattcactttttactcatgatcctgatattccaggtatttataaaataataaatattaataattattgtaattatgttgatactgagtataacttggatttaattaagattgactcttctggatttgtttatggacttgcttggacaaattatggtggcgcagttcttcctgttgaggcaactaagtttgagaaaacaggagacattattctaacaggaagtcttggggctattatgaaagagagtgcacagcttgcatattctatagttaagacctattcttctaagcttaattttgacataaaagaaagtcccgaaattcatttacactttccagaaggggcaacgccaaaagatggaccttctgcaggtattaccattgcaacagcaattgcttcaatactgtctgacaagaaggtccccttggatcttgcaatgactggtgaggtgactttaaaaggttttgttcttcctgtgggcggcattaaagaaaaagttttagcagcctatagaaatggtataaacaaagttattttacctaaagataataaaaaagattattttaagcttccagaagaagttaaggataatatagatgttaagtttgtctctagtttggaagaagtttttgattatttgaatattatt

SEQ ID NO: 564 - DNA, 2085 bp, Borrelia garinii
ttgttcaaaatactggtattaaggaaaagtaaaactcttggtgttttacaaattataggacttattattttattttatttttcaataataagtcctactaatcttaatgctgattttgagtataaggttgtcaaaggagatactcttttttcaattgcaattaaatataaagctaaattaaatgatcttaaaaggattaataaacttaatgttgacaatattagggtgggtcaaatattaattattccaagtgattctaatttagatcagaacattactcataaagtcaataattcttttaattcgttagaatctgttaagaaaggggtaattctttataccacaaaagagaatgacactgttgagagcgtttcaaagcttgttggaataagccaagaagagataatagcttggaatgatttacgatctaaagaccttaaagttggaatgaagcttgtattaactgagcctgattttttaaagccttatgtagttaaaaaaggcgattcactttcaaaacttgctcaggattttgatattagttctaaggatattttaaaatttaattttcttaatgatgataaattaaagattggccaacgtctttttttaaagaaagcgaccgagagtgttaattttcattatgttaaaaaaggagaaactcttggtagaatagcttatatctatagccttactgctagggatcttgtagctcttaatggcaatcgagctgttaatcttaaagcaggctcattgctaaatgttttaaagattgtaaataatgatttagaaaagccttttgagaaagatttaaaaattgaggaaaaaacaggtaatcagtttatctatcattcagttgctgtgggggaaactttatatagcattgctaggcactatggtgttttaattgaggatcttaaaaattggaataatttaagtagtaacaatattatgcacgatcaaaaattgaaaatttttgataaaaaacttttacttgattcttctataattaaatctaaaaacgattcagatattaaaaacaaagttgattctagcgctaattcttctaataaagttcaaacaatagttaattttccctcaagcaaaaacaaaaagctaaatttaaatacttttggaactactgtcaatcaagatctttttgatattagttctttggttattttagactccaaaataccaatatttgaagttgttggtgatttctattattggtatagacctaaaaagataagtcagccaagtgagttttattcagaagattggcattctcctttaaattcttataaaaaggcgactcaacttttcaaaagttttgaaaagttggtaaattctaggtttaataaaggatcaagacttaaagataagttaataattcttgatcccggacacgggggccttgatcctggagctattgttaaatctagagatggtcttggaaacgaagtttttgttgttgaagatgaatatgtttatgatattgctttaaggctttatgtataccttaaacaagaaggggccaatgttgagcttactattttagcccccgatcatttaattaggaatagtgtttttgctaacaatacttttgttaatgttaaaaatgagatttacaatgattatgacctaaacaaaaatgatactgttgattcctggataagcggtactccatcgggccttaaaaaaagattggtcgttgttaaaaacattgttagtaaatataaaaatattaaagataaggatatagccttttttagtttacatgcagataatagtgttggtgcgcctaagagtatggggttttattatcaaaaagatgacgaaaaaaaatatgatattcattcaaaatctgtagcagaaaaaattacagaaggaatgaaaagaagtttttatattaagggtcaaaatctccatgttttaagaaataatatagtaatgacgaagcttttaatagaagtaagaaatttagcatttccagaggaagcttggtctattaggtcttctaagcttagagatcaagattccaaaattcttgctaatgggattttaaaaatattagaaaataat

SEQ ID NO: 565 - DNA, 1686 bp, Borrelia garinii
atgtttagaaaactaaaaaaatcaaaaacttatattattattatttcaataactaaattttcagagaataacctgttatcaataatatcaaatataaaatatttgattgagcacaaacagctagcttacaaaatacattggacatttccaatatacttttttgaaattctaagagaacatgaggaattaaataaatggctatttgaaagatttaaaaccaataaagatatatatatgccaggaacttacagtggaagccctcatgaatacatgctacacgatgaaatacatttagatttgtattgggcactaaaaaatccatttagaagtggatacaaagatatatttcaaaatacacctattatgctttatatatacaacatagaaaagtttagaaaaaaagtgactgaactttacagaaagcttaatttcaattatacagagggaataaggcagagtaaaaataataaaacttacttaattttttataaaaataactgtcaatatttatatgaagtccaaaaaatagattctcccaaaagcaatgtagaaactcttatttatttttatgaaatcaaagaaagctatgataatcaagaattaaaaaattttttactttatttaaaagccttggaaaataatttgcacagcatcaaaatacaaaatctagaaggatctaaacttactgctgaactgctagaaattccaaaatttaactcccttaaagagcaagagccaataataaattttcaaaacaaaaggcttaaagattatcaaatcaatgaaaaaagcttaagagaatttttaataaataaacaacaagaagaaattgttaaagatttggaatccattgcacctaagaatttggaatataatatggaaggaaattttacactatctcacgatcaatacaatatcaaattcgaaaatggaaagttaaataaaataaaatttaaagataaaaaagttgaatttttaaacacatctagaacctatttaaaagttttatcaaaaaaagaattaataagagaagcatctattgaaagctcattttccttctcaaatgaaaaaattttaggaataaaacaatatttagcttttaactctgccacaaaatcaacaattgatttttttatagatgagactatccctagcttctttttatcaattaaaataaaatggccttccaaaatcaatctggataaaaaaacattaaaaaaatgtaatcctgattatcttcttgaatattcagcccttgaaatacctatttttgaaattgcaaaaggcactaatttaaaaataacagcaaaatacagtgatcttgatacttatgaaaaaataataataactaaaaacaatcccaaaggatacattaatggtacagaatttttaatatctaaaggaaatgataaaaatagtaatttttttataagctttttaaatgttgaaaaacaaatcattcatacaattaattataaaattgaaaaaataaattctaaaaaatggttaattttaaacatagggggttcctataacacagtcaagatccaagatgtaataaattattctcaaacgctaaatttaatgatactgccattaaataataattttgataacaaaataaaactgaattcaaaaataaaaaatttaattttttatactaatataaaaaaatatgaaaataaa

SEQ ID NO: 566 - DNA, 1635 bp, Borrelia garinii
atggctaaagacatatattttaatgaagatgctagaaaaagcttacttagtggcgttgaaaaattatccaatgctgtaaaagtaactcttgggccaaaagggagaaatgttcttattgataaaaagttcggttctccaacggttacaaaagatggggttagcgttgctcgcgagattgagcttgaaaatccgtttgaaaatatgggagcgcagcttttaaaggaagttgctattaaaacaaatgatgttgccggcgatggaacaacaactgctactgttcttgcttatgctattgcaagagaaggccttaagaatgtgtcttcaggaattaatcctattggaataaaaaagggaatagatcatgctgtaaatttagctgctgagaaaattcgtcagtctgcaaagaaaatcacaacaaaagaagagattgcacaagtagcttcaatttctgctaataatgacagttatataggtgaaaaaattgctgaggcaatggataaagttggaaaagatggggttataacagttgaagagtcaaaaacttttgatactacgatttcttatgttgagggtatgcaatttgacagaggatatctttctccttatttttccaccaataaagagaatatgagcgttagctttgatgatgcttttatattaatatatgagaagaaaattagttctattaaagagcttttaccagttcttgagaaagttttaggaacaaataaacctttattaattattgctgaggacattgaaggggatgctcttgccgctcttgttttaaatagcgttagaggagccttgaaagtttgtgcaattaaatcgcctggttttggtgatagacgaaaagcaatgcttgaggatattgcagtgcttaccggtggtgttttaatcagtgaggagctaggtattactcttgagacagttgaaattgagcaacttggacaggctaaaactattaaggttgataaggacaatactactattattaataccggcaataaagagcaaataaaagagcgttcagagcttattaaaaaacaaattgaagattcaacatctgaatatgataaagaaaaacttcaagaacgtcttgcaaagcttgttggcggagttgcggttattaatgttggagctgttactgaagtagagcttaaggaaaaaaaacatagagttgaagatgctctttctgcaactcgcgctgctgttgaagagggtgttgtgcctggtggcggatcaactcttattgaagttgccatgtatttggatacaatagatacaagcaaattaagctatgaggaaaagcaaggttttgagattgtaaaaagaagtcttgaagagccaatgagacagattatttcaaatgctggttttgaaggatctatttatatccatcaaattaaaactgagaaaaaggggcttgggtttgatgcttccagcttcaagtgggtaaatatgattgagagtggaataattgatcctgctaaggttacaagaagcgcgcttcaaaatgctgcttcaattgctgggcttttattaacaacagaatgcgcaatcaccgatattaaagaagagaaaaatacttctggtggcggtggttatcctatggacccgggaatgggaatgatg

SEQ ID NO: 567 - DNA, 744 bp, Borrelia garinii
atgtataaattagttttagtgaggcatggagagagtgaatggaacaaagaaaatctttttactggttggacagatgttaaactttctgacaagggtatcaatgaggctttagaagcaggtttgctcctaaagcaagaaggctattcttttgatattgcttttagttctttattgtcaagggctaatgatactttaaatattattttgcgagaattggggcaatcttatattagtgtaaaaaaaacctggagattaaatgagaggcactatggagctttacaaggtttaaataagtcagaaacagctgcaaaatatggggaaggtaaagttttaatttggagacgcagttatgatgtgcccccaatgtctttagatgagtctgaagatcgtcatccaataaaagatccaagatataaatatattcctaaaagggagcttccttcaacagaatgccttaaagatactgttacaagagttattccttattggactgatgagattgcaaaagaagttcttgggggtaaaaaagttattgttgctgctcatggcaattctttaagagctcttgttaaatatcttgataatttaagcgaagaagatgttttaaagcttaacattcctacgggtattcctttagtttatgaattagataaagatttaaatcctattaaacattactatttaggtgatgaaagtaagattaaaagtgcaatggaatctgttgctagtcaaggaaagttaaag

SEQ ID NO: 568 - DNA, 1023 bp, Borrelia garinii
atgaagatgaaagctaaaagtattttactttttttattatccacggctctttttgctcaagagactgatggattgccagaaggctctaaaagggcagagcctggagaattagttttagattttgcagaacttgcaagagatccaagttcaactaaacttgatcttacaaattatgttgattatgtttattcaggtgcttctggtattgtgaagccggaagatatggttgtagatcttgggataaataattggagtgttttgcttactccttctgcgaggttgcaggcttacgttaaaaattcagttgttgcgcctgctgttgtcaagagcgagtcaaaaagatatgcaggcgacactattttaggagtaagagttttgtttccaagctattctcaatcatctgctatgattatgccaccatttaaaattcctttttattcaggagaaagtggtaatcaattcttaggcaaaggtcttattgataacattaaaactatgaaagagattaaagtagcagtttatagtttaggatatgaaatagatcttgaagttttatttgaagatatgaatggcatggagtatgcttattccttagggactttaaagtttaaagggtgggctgatttaatttggtcaaatcctaactatattcccaatatatcatctagaataattaaggacgatgttccaaattatcctcttgcttcaagtaaaatgagatttaaggcttttagagtttcaaaatcacatagttcaaaagagcaaaatttcatcttttatgttaaagatttgagagttctttatgataagttgagtgtttcaatagattctgatattgatagtgaatctgtgtttaaagtttatgagactagcggaactgaatctcttcgtaaattaaaggcacatgaaacttttaaaagagttttaaagcttcgagaaaaaatttctatgcccgaagggtctttccaaaactttatagaaaaggttgagagtgaaaaacctgaagaatcatccccaaaaaag

SEQ ID NO: 569 - DNA, 1401 bp, Borrelia garinii
gtgcagataaaagaaatttattttggacctaaaattttagacgataaaaattgtaattctaaattgaccaattttgattttaaggttgtttcttttgagcttggaccagatcattatttggtagacattatgcaagttaaagaaattagaaaatctagtaattttacttatgtgccaaatgtcaaaaaatatgtagctgggcttgataatttacgaggcgaaataattcctattatagaccttagaataatgtttaatttagaatttaataaaaaagatcttgaagatattatggttttaaaaaatgaagaccttcttataggggttattgttgataaaattaataatgttttttcaatagattctagtcttattcaagatccacacccagttttatctcaagattctttaataaactatataaaaggcgttgtagattataacgaaaaactttatatactcctcgatgtttttaaaatttttaattatagtgaagaagaaaaggtattaaagcctggccaaaattctgctgaaaaaatcgattttgtaagcgattctgatgatttagatgtgctagatgattgcaaaggtaattttgtcaccaataatgtttttccaaaaaatagtaataacaatgaaaattcaactttaaagaatatttcaacttttaatttggagaatattaaaaaaaatcttttgaaatacgagtttaatgcttctttagtaaatgatgtgtttttagaaaaagttggagtaaaatttaatatggttgatactgattgcttgccttacgatatttttttaaatgaattttattcaaaatcatcgggaagtttgtggggagttgattgtttggaagaatttcaaaatgaaattgttaagaatcgcttaaattttatggataatttgaattctatttttaacgtgttggaaattggttgtggtagcggaagagagactatagccttagttaatgctttgtctgaatattatgtaaaaccttttaagttgacagctattgataatgatttgtcaaaagtggttgaaacttctaggttgattttttcagagtcagaaattggtattagtgaaatttatcgtaggaactcttttgaacaaagtcctggggtttataaatttaagtcagaaattcttaataatgtcttgtttgaatattccgatgctcttttttcagatttgcctgataatttgggaatggtttttttaaaagatgttttatgtttcttggatagtaaagatcagattttaattttaaatatcattgcttccaaaactattaaaggggctcttttggttttgggagataacgaagagcttaaaaataatgatgtttttataaaagagaaatccgcaaaatattttaacttatacaggaaagtc

SEQ ID NO: 570 - DNA, 2259 bp, Borrelia garinii
atgcttgtgaagcttaaatacaggtttgttggatttttattattgtttttaatttttatactgttgcttttttctatgatttttaattttgttttatgtggttatttagaagattattataagcagcttacaagggcgcaattaagaagagcagctttttctacgcaatcttttttagacactttgtatgttataatcaacggtgcagcttctaatttagcacttgaaaccatatcagaatttgcaatttccgagaatagaggaaaagatttctctgagtctgaattggtagatttaagaaaaaattcaaaatttgttattgattctgtaaaggtgaataaaaaatatcgacaatacttatacaattttatgactaatcttaaaaatgatactctttttgaagaattcgcgttttttgattttgaagggagaataattgttagcacaaggcatgaaaataatatggattttggacattctgaggccaatactaattattttaaaaaagcgattgaggattataagcaaaaccaattaaaatttataggctggtattcaaatctttctgaaggaatatctgcagaagttgccattaggtctaggcaaagtgaaaaaaaggcttttgcaataattgtgcctgtatactccccagaagataagcttgtttgtggatatttggctggatatttgcttaatgatgttttagcagatagttttgatagatttagatttggtttttataaaaggggcaattttgtttatatagattctaataatatagcagttaatccttttgaagaatacaatgaaaccagtagggttagttctaaatttttaaatattcttaaagatgttttttctaagccacctcttttatcaaatattcctactgaagtgtcggtttacactattgataggatattattctccgaaatgggagaagagtgttattatgcattgttgcccataagtagtaaattaggagagaaaggtggggtgcttattgctagacttccttataaagatatttacggagtaatatctagtctaaaatttcagtatatcttgtattctgttttaggcattatttcattaagcattgttcttttaatgagaatagataggattattagttttcgtttaaacgcaattagagttttagttcaagatatggtcaagggagatttagacaaagattatgcccttgatgatggtgatgattattttgatgagcttggcatgttaagtcttcaggttgtgaaaatgaaaaaagctatttctgtagcaattgctagtgttttgagaaatattagctatgtaaataaggcaagtttagaagttgccagttctagtcaaaatttaacttctagtgcgttacagcaggcatctgctcttgaagaaatgtcagccaatgttgagcaaatagcgtcaggtgttaatatgagcgctaataattcttatgaaactgagcaaatagctttaaagaccaatgaaaattctcagataggtggtaaagctgttgaagaatctgttattgctatgcaagatattgtagagaaagttagcgttattgaagaaatagctagaaaaaccaatttacttgctttgaatgctgctattgaagctgcaagagcaggtgatgaaggaaagggatttgctgttgtggctagtgagattagaaagttggctgatcttagcaaaatttcggctcttgagattggagagttggttgaagataactctaaggtagcaaccgaagctggagtgatcttcaaagaaatgttacctgaaatagaagaaacagctaatcttgtcaaaaaaatttcagaaggtagctctaagcagagcgatcaaattgctcaatttaaaatggctttagaccaggttggagaagttgttcagtcttcagcttcaagtagtgagcaactttctagcatgtctgataaaatgttagaaaagtctaaggaactcagaaaatctgtattatttttcaaaattaaagattctaagattgaaaatctggaagatggtgattatgatttcaggttgatggattgtcctgaaaattcttttaaagatgaaaatcaagatttgaaaggaaatgaaatctctactttaaatggcagtagacatagtaattattctttaagtattgaaagcgagccttctgcaagaactattaataagcgggttgatcctaaaaaagctatcgatattgctgataaggatttaaattttgatgatgatttttcagagttt

SEQ ID NO: 571 - DNA, 951 bp, Borrelia garinii
atggatttgattagtttttctgtgcctggaaatttgcttttaatgggggaatatactattttagaggaaaatggattggggttggcaattgccatcaataagagagcatttttttctttcaaaaaaagcgattcttggcgtttctttagcaaaaagaaagagatagatgatttttctttaatagaaaatagaaatgatcttgtttttaaaatgttttcatatttgagtcaaaattgttttttaaatttagagagttttgcatatgatgtttatattgatacaagtaattttttctttaatgatggaactaaaaagggatttggatcaagtgctgttgttgctattggtatagcgtgtggacttttttttatttataatgctactaatgttgttgagaaagatgaaatttttaaatattgtttagaagcttacaggcacgctcaaggaggaataggtagtgggtatgatattgctactagtatttttggaggtgttattgagtttgaaggcggttttactcctaaatacagacaactaggttctttagagtttgatgatttttatttaatgcggggtttgcaagcagttaaaaccactgcttctatttatgagtacaataaacatagagattctattttagattttatatttaaatgcaattcggagatgaaaaaacttgttttaagtgttagcacttctaaatctgcattaatttctagtttaagaagagctaaggaattgggattggcaatcggagaggcaataggaatttctgcagccttgcccccaagttttgagcaccttcaggatcaatgtgatttgattaaggctttgggagctggaaatgaaacttttttagtttttaggcctaatattaaagcttttgatttgtcaaaaattattccaattgttctagagcacgaaaacattaagtttgaaagcgagaaatgc

SEQ ID NO: 572 - DNA, 1779 bp, Borrelia garinii
atggagtatttacaaactgcagcttcaattaaagctaaatttgatattgtagctattgtggagcaatatattaagcttgctaaatcgggatctacttataaagggctgtgtccttttcatgccgagaaaaccccttctttttttgtaaattctttgcaaggatatttttattgttttggatgtaaaaagggtggggatgttattggatttttaatggatatggaaaaaatcaattacaatgatgctcttaagattttatgtgaaaaatttggtatttattataatgatttaaaaataaatcgaaaaagtgaaaaaaaaagtgaaaataaagacatggtttcaaaaatttactctttaaactctagattaatcaatactattaaattttttttgaataaaaataaaaaagcattagattacgttttaaagagtagagcaatatctaaggaagtcgttgatttatttgaacttggttatttgccgtttagtattaaagatggcttagaacttcatgattttttagtttcaaaaggatactcttctgaaatactaaggaaaagtggtttattctcaaaaacaaatcccaaagcttctattttatctcaaagattaatttttccaattaaagattttaaaggaaatgttgttggctttgggggccgagatttagatgggaaaggctctaagtatattaatttaagtgaaactgaagtttttaaaaaaaaggagcttctttatggattttatgagggtcttaatgagattaaatctacaaagtcagttatattagtagaaggatatatagatgttcttgccttttttacatctgggattaagagagctgtatctacccttggcacttctttttcaaaagaacatctggctttgattcaaagatatgccaatgaggtaatattttcttttgacggggatgatgctggactttctgcaactttaaaggcttatcaaatttgtttgccatttaatattaatgttagtgttgttaaaatggattttggccttgatcctgcggatcttcttaaagataaaggtgagggatctttacaaaaaattttaaataataaatgcgatgcttttgaatatctcttagatgcttattctaataaatatgatttaaataaaactgtagatttaaatgctatgattaatttatttttaaatttgataaatttatctaaaatagatactcaaaaaaaaatttttttagataagctaagcaataagcttggtgttggtgtaacaactttattgaaagattattatagaataaaagaaagatttgtagttgacaataataaaagaaatttgtatgctcataatgatgattcttatgagaggtatctaatagtagctttgttgaaaaattttagttattttggtataataaggcgcaatattattgatagtgatttaagtgatatcaatgccagaaaaatttttatgtgttttgaggatttatttgaaaataataaagatttttcattaatggatttaaaaagaaatttaaaagatagctataaagttagtgaatttttttttgaagaaattttaaattctggatttgaaatagatgatgaggcgctcattcatattttaattgcaatcaagagaagaaaattagattctcgtgttttgctttgcaagaaaaaaattgatggggactctttggtaaatgctaagattcaaataaatgaattaatgtttttaaatatgcagagaaaaaatttaaaaatctacacagacgatgttccagggagt

SEQ ID NO: 573 - DNA, 675 bp, Borrelia garinii
atgacaaatctaatttttaaagagaataccatatattcaagcaaattcgatgacatctattacaatccaaagtatggaattgaagagagtttttatacatttattaaaggctgcaatctggatttagaattaaaaacaaaagaaaatattttaatagcagagttaggatttggaacaggattaaactttatatgtcttttaaaattcataaaagaaaacaatataacctcaaagattaattattattctatagaaaaatttccactcaaaaaaaagacaataatgcaaatttcaaagttcttcgttaaagaaaccgcttatttcaaattaatgctaaaacattatcctaaaattccaaaaaaaaatttaaaactaaaaataacagaaaatgttaatttaaaaattttaattggaaacgctaaaataaaaatcaaagaaattccaaaaaatgtagaatattggtttttagatggatttagccctaaaaaaaatcctgaaatgtggaacaatgaaatatttaatttaatttctcaaaaaagcagtccgggatgcaagctttcaacattttcttctgcaagaattgtaaaagatggcttaaagcttgccaatttcaaatacattcacatagaaaaaggatttggaaataaaagacatatgataagggcccaaaaaaat

SEQ ID NO: 574 - DNA, 2079 bp, Borrelia garinii
atgaaaaaaatgttactaatctttagtttttttcttatttctttgaatggatttccccttaatgcaagggaagttgataaggaaaaattaaaggactttgttaatatggatcttgagtttgtaaactataaaggtccttatgattctacaaatacatatgaacaaatagtaggtattggtgagtttttagcaagaccattgattaatttcaatagcaactcaagttattatggtaaatattttattaatagatttattgacgatcaagataaaaaagcaagcgttgatgttttttctattagtagtaagtcacagcttgacagtatattgaatttaagaagaattcttacagggtatttgataaagtcttttgattatgaaagatctagtgctgaattaattgccaaggttattacaatacataatgctgtttatagaggtgatttaaattattataaagagttttatattgagtctgctttaaagtctttaactaaagaaaatgcaggtctttctagagtgtacagtcaatgggctggaaagacacaaatatttattcctcttaaaaagaatattttatctggaaaaattgagtctgacattgatattgatagtttggttacagataaggttgtggcagctcttttaagcgaaaatgaagcaggtgttaactttgcaagggatattacagatattcaaggagaaactcataaagcagatcaagataaaattgatattgaattagataatgttcatgaaagtgattccaatataacagaaactattgagaatttaagagatcagcttgaaaaggctacagatgaagagcatagaaaagagattgaaagtcaagttgatgctaaaaagaaacaaaaagaagaactagataaaaaggcaatcgatcttgataaagcccaacaaaaattagatttttctgaagataatttagatattcaaagggatactgttagagagaagattcaagaggatattaacgagattaataaggaaaagaatttaccaaaacctggtgatgtaagttctcctaaagttgataagcagctacaaataaaagagagtctagaagacttgcaggagcagcttaaagaaactagcgatgaaaatcaaaaaagagaaattgaaaagcaaattgaaatcaaaaaaagtgatgaagaacttttaaaaagcaaagatcctaaagcattagatcttaatcgagatttaaattctaaagcttctagtaaagaaaaaattaaaggcaaagaaaaagaaatagtcaaagagaaatcaaaggtaagtttaggtgatttggataatgacgaaacccttatgacgccggaagatcaaaaattatctgaggataaaaaattagatagtaaaaaaaatttaaaacctgtttctgagattgagagagtaaatgaaatttcaaagtctaacaacaatgaggttagcaaatcatcaccattagataagccttcttatagtgatatcgattcaaaagaggttgtagataataaagatgttaatttgcaagaaaccaagcctcaagctaaaagtcaatctacttctttaaatcaagatttgattactatgtctatagattctagtaatcctgtatttttagaggttattgatcctattacaaatttaggaatgcttcaacttattgatttaaatactggtgttagacttaaagaaagcactcagcaaggcattcagcgttatggaatttatgaacgtgaaaaagatttagttgttattaaaatggattcaggaaaagctaagcttcaaatacttaataaacttgagaatttaaaagtgatatcagagtctaattttgagattaataaaaattcatctctttatgttgactctaaaatgattttagtagctgtgaaagatagtggtaatgtttggagattggctaaattttctcctaaaaatttagatgagtttattctttcagagaataaaattttgccttttactagcttttctgtgagaaagaattttatttatttgcaagatgagtttaaaagtcttattactttagatttaaatactttaaagaaagttgaa

SEQ ID NO: 575 - DNA, 1011 bp, Borrelia garinii
atgacaaaaccaaaaatatcctcaatcaataaagaaaaaataaaaatattgacaatattagtgttaacatctacattcttattaggaataattttttcaaatgaaaataaagtagcaagaatcctggaagaaaaatttttcgattttgacttaaatttaatttctaaaatcgaaacagaacttgaaggaacactgacaaaacttggtaaagattggatgctaacatacaacaaacaaaatattcccgttgacaataaaaaagttaatgctctaatcagagcattagacgaacttcaaaaaaataaacttgtaagtagagatcaaaaaaaacacaaagaattgggaattggagaaaatccaagcttcaaattatttgacaataataacaaactattgacagaaatttttgttggaaaaccaggagaaggcgattcaagattggcatacattaaaggtagtagcgaaaatgtttacttaacaaaaaatattttcttatcatataaagggaattcttataatacattttcagatactacactatttcaagaaaaaaacacaaaattagaaaatttatcattcaaaataataagaaaattaaacaaagaaaatgaaaataacataaataataactatgagattaccacgaaagatggtctttattttttaaataaccaaaaaatgttaaaagaaagacctttaaatattattgctgaatttaaagccgatggacttgaaattgataaatctaaaataaatggctataaccttcaatacaagattgaagtcaaatggagcaataaaagtgttaacaatattgaagtttactttaataaaaacgaagaaaatgacaaagacatattaatcaaaaaagataaagatgaatattactacatgactagcaaatggactttttttgatgtatttaacttagaaaaaaaaataatagaaaaagataatatttctagcaatgataatcaagaagatgagcatgaacaccacaacaatgcagat

SEQ ID NO: 576 - DNA, 921 bp, Borrelia garinii
atgataaatgtagaaaaagttaccaaaatgtatggctcatttacagcgctacttaatattaactttaaggtggaagaaggcgaagtgcttggcatacttggcccaaacggagccggaaagtccacattaatcaaaatcttaacatcatttcattatccaagtaaaggtaatgtaaaaatttttggaaaagacattgtagagcattcaaaagaaatattacaacaaataggatatgttcctgaaaaactagctctttatccagaactttctgttaaagaatatttaaagttcatatcagaaataaaaggtgttaaaaaaataaaaaaagaaattgacaaggtaataagcatatttaaattaaaagaagttgaagataagctgatttctcaactttcaaaaggatttaagcaaagagtaggaatagctggtgctttaataaataatcctaagcttgtaatacttgatgaaccaacaaatggtcttgacccaaatcaaataattgaatttaaagaattcttaagagaactcacaaaagaaagtacaatattattctcttcacacatactaagcgaagtagaatctatttgtaaaagaataattattgtcaacaacggagtaattgttgctgatgacacaaaagaaaatattattaaaaataaacttaaagagatcgaaatagaattaatagttttaaaaaaatctgaaaatgaaaaaaaaattttcaatagtaaaaacgatatttttacattaatacaacttgaagaacacgagaaggacttaaatatttcattaaaactatctcaaggcaaaacagaagaagatctctttagctacatagtaaaaaataatataatcttaaaagcaatgatcccaaaacatgaaagtcttgaaacgatatttagcaaattaaccaaggagaga

SEQ ID NO: 577 - DNA, 327 bp, Borrelia garinii
atgaagctaaacgaataccaagaaaaagcaaaaaaaactgctaaatacaaaaataaaaaagaagaattaattttaacaacacttggtcttgctggagaaactggagaagttgttgaaaaaataaaaaaattaggaagagataaaaattacattattgatgatgagtacttaatatcaattaaaaaagagcttggggatgttttatggtacttatcaactttaagtaataatctaggcattacacttgaagatgttgccctaacgaacctaaaaaaaatacaaaagcgtcatgagaatggaacaataaatggtgaaggtgacgacaga

SEQ ID NO: 578 - DNA, 1044 bp, Borrelia garinii
atgacaatacttccaaagattgccaaagacataataaaagcatatgatcaaaaaatattgccaaatgcaattcttttactaggagaaaagttttcatcaaaaaagaccagcgcaattgagattgcaaaaaaaatattaaacgaaaaaaacttaacaaaccctaatttgctcatttttgcaaatctcgatacaatagaagcaaaagcacatctttctacgaattcgtataagataataaataaatacctagaatacattaaaactgtaatttttaccaaatgttatttcagtaatgaaaaaaatttaaaaaaaatagaaaaaaatatcaactacattaattctgtttattataaaaaagaatataatataaacataaaaaatgagtttataaaaaatatagaaaatataaacaaagaactaaatcgtagtattactgtttatgatgtaaaaaaaattcaaacttggattttttctgaaaaagaaaaaccaaaggtaatttacataaacgaaatcgaaaatttatcatttaatgtacacaactcacttttaaaaatactagaagggcctccttcaaatatttactttatcttagcagcaagaaataaaaacaaaataccaaaaacaatactttcaagacttagagtctataatttcacaaaaccagaaaaaagattgggaattcaaatattcaaagaaagctttctaacaaacaaagacataacaattgaggagtatttcgcctcattttacgaagaagaaagcaaaaaaataaaaaaagaattaataaaaattttaaatataataaaggaaaaaaaatccatatttaatcttgaagaaatcgactttataaaagatgatcaaagctttaaaatatttttaaacgaacttacaattaacattagaaaagattttttagaaaacaagatagatattaatcaatatctcaaatacacagaacatttaaaaaatatttataaatatcgcccttataatcaaaataaaaaattaataatagaaaacttgatgctaaattacgaggagata

SEQ ID NO: 579 - DNA, 993 bp, Borrelia garinii
atgaacaaactaatgttaattgcatttgcaacaacaaatctattggcccagacaaacaaagcttcaacagacctaaaagcagaacaatcatttaacgataagttgtctgaaagcgtaaaattaaaagaaattgcaaatatttgtcccacaaatacaaattttttaacaggcattggaatagtagtaggtcttgctggaaaaggagactctttaaaacaaaaagaccttataagtaaaattttaaaagaaaacaatacaatagatgaaataagccctaatagcatagaaagcaaaaatattgcgctagtaagtgtaagcctccaagtaaaaggaaatgccattaagggctcaaaacataaagcttgtattgcatcaatattagactcaaaagatttaacaaatggaatacttttaaaaacaaatcttaaaaataaagagggagaaataatagcaattgcatcaggaattataaagaccaatggcaaattaaaaggatctgaatacaccttggatagtataataataaatgaaaatcaaaatgccagctacagttataatataattcttgaaaaaggaaattatacattaataaatagaattcataaaatattaacctctaaaaaaatcaacaacaaaattaaatcagataacataatagaaatagaagcaaaaaacatgggcctattagaagagattgagaatattaaaatagaaactaatcctaaggtactaatagacaaaaaaaatggtattatcctagcaagtgaaaatgcaaaaataggaacttttacattttctattgaacaagacgatcaaactattttaaacagcaaaactaaaacaacaattcaagtaaactcaatgaaattaaacgaattcatattaaaaaattctaataatcttagcaataaagaattaattcaaataattcaagctgcaaaaaaaatcaataaattagatggagaacttatcttggaggaaattaatggaagc

SEQ ID NO: 580 - DNA, 1182 bp, Borrelia garinii
ttgcgaaaggatttaatttttttagttttaatcgttttaataatagcgagtgtagtaattttttttattagaagctctaaaaaagagctagtttacttcgagcttaatacaaagaacaatattagttttttgtttttagtagaagatcttaataaaaaccttgtaagcatgcaagaaatttttattaatataaaaacaggaaatcttggttttttagatattccaatccatactggatatgaagatttaaaaggcaatatatcttggtttaaagatctttataaaaagaattcttttactaagtttttgtctaaaattcatacgcaattatctcatgaatcagattattatattcgttttcaaaaagaaaattttgttaaacttattgattacttgggaggtgttagacttcttgttaaaaatccagtaaaagtttatagttttgaggattctattttaataccctctggtacttctaattttgatggtgataaagcttatgattatttaagatattttaatgatgttaatcagtttgaagagagagttgagttttttaaagagttttttaaaaaacttctttttcaaatttcagattttggtattgaaaatgacaattttttcaaaatatattccatgatagatactaatctttcagaggttgtttttaagtatatttttaaaaattataaaatcaataatgataaaattatttctattaatattaaagggcaagaagagatttttaaggataatcataataatttgataaaagttgttcttccagaatatgggggcgctattttaaaagaatcggtggataaattgaataaagagttggttaatgaaggcccagaagagatagtaaagattgtcgttttaaatggaacaaaagttgctggacttgcaaaaaaaacagcaaatatttttaattctttaaaatttaaagttttaaattttgacaatgcagataaaaattcttataaaaataccttgattattaataattcggataatttagaaatggctgttagagttggcgaggtaattaaagctacaaatattaagccaatttctgaagttcaaactaaaagattattagagcttgataatcttgatattaatcctgatgtaatagttgttttaggagatgattttaatggaagatatgttaaaagtaaa

SEQ ID NO: 581 - DNA, 1917 bp, Borrelia garinii
atgaatggcaataataatatgaataataatggcaaatctaataataaaaagaagaataaaaattggattttaggatttgttgttatttttttaatttcagcaatatttatgtcatattttataaggggaggggaaagctataaaaatgttccttatagcacttttcagaattatttggacaatggcctagttgagtctgtagtaataattgataaaaatttgattcaattcgttgttaagggttctaactttgcaaaatcttatttttctaccagtatcccttatcttgatataaatctgcttgcagaattaaaaaataaaaaagttgagcttagctcagggaaaagtcaagcttctttgattggggttttattacaaactttaccatggattttattttttattttctttttctttatatttcgtcaaacccaaggtggtggtggaaaagtttttacctttgggaagagcaatgctcaaaagtatgaggctggaaagaataaaatcacctttaaagatgttgccggccaagaagaggttaagcaagagcttcgtgaagttgttgaatttcttaaaaatcccaaaaaatttgaaaaaataggtgcaaaaattcccaaaggagtgcttttagttggctctccgggcactggtaagactttgcttgccaaagccgttgctggagaggctggggttagtttttttcacatgtcaggttcagattttgttgaaatgtttgttggagttggagcaagtcgtgttagagatttatttgataatgctaggaaaaattctccatgcattatttttattgatgagcttgatgctgttggtcgaagtcgtggagcagggcttggtggcgggcatgacgaaagagaacaaactcttaatcaactattggttgaaatggatggatttggaacgcatgttaatgtaatcgttatggctgctacaaatcgtcctgatgttcttgactctgctttgcttaggcctggacgatttgataggcaagtaacagtttctttgcctgatattaaggaaagagaggcgatattaaatattcattcttcaaaaacaaagctttcaaaagatattaatttacaggtaatagcaagagctactcctggggctagtggcgctgatcttgcaaatttaattaatgaaggagccttaatagctgcaaggaataatcaagatgaaattttaatgaaggatatggaagaggctagagataaaatattgatgggagttgcaaaaaaatctatgactattactgataggcaaaagcttgagacggcgtatcatgaggcaggtcatgctttgcttcactattatcttaaacacgccgatccacttcataaggttaccattattccaagaggcagagcacttggcgttgcattttcgcttccaagggaagataggctttcaataaataagcaccaaattcttgataaaataaagatatgttatggtggttatgctagtgagcaaataaatttaggtgttacaacagcgggcgttcaaaatgatttaatgcaagctactagcttagctaaaaaaatggttacagagtggggtatgggtgaagaagttgggccaatatttctagtagatgatgaagcacccatttttcttccaaaagagttttcaaaggctaaggcttattctgagaacactgccgataaagttgacagagaggtaaaaagaatacttgaagaatgtttaaaagaggcatcagatattcttgtaaagcataaggatcaacttgttaagcttgcaaaagaacttgttttgaaggaaactttgacagacaaagaagtgagagaacttttaggttttgaagttagtaaagatgaatgcgatttatttgtagtagagtctattgcaaaagaagtagagggggaagataaaaaaggt

SEQ ID NO: 582 - DNA, 4398 bp, Borrelia garinii
atgaatttggggtttttgagaaataagacatttttattgtttactctaccattttttgtttttgttttaataattttttccattaatctatttgttcaaattcaaatttattctgcaaagttttttgttgtaaaatatcttgaatccaaatttggctttaggattaaatatgataaaatttcaccgtattttttatcatccattaaaatagatggtttggaactaagcttatatggaaaagataaaatcttaatggatgttgttagggtagatttaaatctgtttaaattaattttaggcgatgaaaatattattttaaatgtttatgttaaaggtagtaatttaaattttgatataaacgattttagtatatcgaatgatttaaattctagcagtgcctacgacaatgaaaatgtaattttaaataaaattataaactatctttacagattaaatattaatttagaaaatatcaatattaatattaagcttaataagaataatagttggttgaattttaaagttaaaaatttttccttaagcaccgtagatgaagattttttatttagctctgtagttgattttagtgctgttaaaaatttagaaattaatttaccgtctgaaagagttgatgatggaattttagattcaactttctattttgaggggaaattcaaaaaaggctttgaggatggttatgttaattttagtttttttgagtttaaaacaaaatatttttctttgcttgagcaaggattccaaataaattattcaaaaggaaatttaaaaatttttaatttacgaagagagaattttgattttaatttaagttatgacaaagccaatggttttattcgattagatgctttattttttaatgttaatcttttagattggattaacttaaatgaagactttgaagtttataaagattattttgatataagtttaaatggtcagttggcattttcttatgattttaaagataaagatttaagatatgcaggaataatagattcttctttaaatgtagatactataggcaaagaaattcaaggcttacaacttgaaatcaaaggggatgatagcattgtaagtgttaagaatgctattttaaagcttaaaaggggagttgtaacctataaaggttattattctttaaaagacttgcttccaatagggcgtcttaactttaagtcttcaaaaattttaaactttaatgacctaaatggatatttagatttcaagaaagataaaaatattttttcagttaattctgataattttagtcttgggaatcttaattttcaaaatttaagtttaaaaacttattttctaaaggataaaatttttattgactatttgatttatttggaaaataaaaattctcaaatttctttaaaaggcgatcttaaagatgaggaatttgcttttaatttaggtattaaagagcttcctttgctttttttaaaagaagttattcctagttcttacttaataaatttttttcccaggactttattgtcgggcaaatatttaaatttagtttctgattttaatttaaataaatttgattatcataaaaatagattaaaaacattcaatttcatggtattttcaaagttagataatttcaattttatatttgatgctagtggagaaaaaaatttttacaaatcaaacaactttgagttgcagtacaatgatcacaatttgcattccagtttgtttattgagctatttgaaagtggatttaatattagcacgaatttttcttatttggataaaaattatcctttacattttaatgtcaatcttaaaaacaagcttattattgccgaatctcctcttggcatcaaattcaatttaaattattttgatcctaaaataatttatgcccttaatgttaatggttttaaggtttgcaataaaacttctgatcttttgataaatataaattttaatgggagctatttaggtcttaatgatgatttaaaatttaaaatagataagtttaatatagtaaaagcctctaaaataccctcttataattttaattttggctttaagggtttatatgaatatgataaattgcacattttcgatgttaggcttgtaaacaagctttcaaatttgcaaggatatggacaatttaatttaaaagataatcttaatggaagtttgaatctattttccagcttaaattcagaacgatattttttaggtattaattccgatgaatatggtagttattttttgcttaaattccaagacttagatttttacaattttaattctttgtcccttttagagggaaaggttaatggtaattttttgctaaattttaaaaagaatgatttaaaaaattattctttgagtggatatcttgaggccgataagttaactttattgggcatacctgtacagctttctttaaatttgggattattagataataaacttaacatatatgacataaaagccaagcgcaataaaaaagagtttctcactggtagtctaaggtatgatttaagcagttctataggtgtatctaatatggtttttagtagcaacttgttttcttataagtttaatgcaaattttagaaactttgaaagtagagatgaagagcgatttggagttttgaaaaccaaaatagaaggtgaattctcctttagagatattaaatataaagatgagtttttatccaatcttactgttgaatttagtaatgattttgaaaaatttaacatgacttcaattgattatgatcttattaatgttttataccattatagcagtggagaatatagctttattttaaaagattatttacctcttagttttaattcgtcaggcaaaataattaagaataaaattcttgggaatgtcagagatattaaatttgattcaaaaataatcactaaagattttttagactcacattctttatttaatattgacaatcattttattctttatgatcttgttttaaatggtgaatttgatattgatggggatttatataatcctaatattaatggaattttaaatattcaaaaagggttagtaagtactgagtatttaagagcttctagaaagtttggtggtgatagggctttagaaatatttgatatgccagttgaaattcaggataataaaatcatttttagtaatgagtttaacctagatagatactctaaagtttttgtttctactagcttaaatttaaattttttaagtgatactattattgattattacaaaatagatattagtgtgactggcagaacaggagttcctattaagtttgacaaaattgctttaagctttacaggttatgctttaggcaatttttcaattgaagggaatgccgatgaaattatgtttaaaggaattttaaatatttcaaatgcttgggtttattctcttgaaggttctattgttaatttattagtaaatccctttaagcaaacaaaaagagtgcaaacagttgatgttaatgtcagggattttgatattttgactgatcttgaaataaattttgacagcggtgttacttttcattggccagatagtaatatttcgtttttacaagctactatttcaagaggggataagcttttaataaaatctgatacaaaaaccgatgattttattcttaaaggagatttgaacattgcaagtggtttcgttaattataataataaaaaatttatctttaaaagtggcgcttatatatcttttaatgagagcagagctaaatttgatccatggataaaggctgaggctacaaatactattaaagatagaaatgataaactgcttgttacaataagtattgatagtcctttaagtttatggaaaatcgagtttatgtcttatccttctagaactgaacaggagattaaatatttactctcaggctcaacaatgggtgaggctgaggggggattgcgatcggcagggactaatgctgccgaaatggcaattgggatagtaagtgacattgctcttgattttttaattcaacccattgaagattatatgcgttctgtattaaacttagatttgttgagtataaagacagatatattaaagaattctattaatagtaatttttttaaaattgggaatcctacttttgttgatgttcttgacaatacaagtgttaaggttgggaaatatcttgttgagggtgtttttattagtgggggctttggttttctaaaagagcaaatgactcctttttcaaaggatttaaattttgttattaatttgggcattgagtttgattctccatttttcttggttaattatgagtttgattacaattttatgaaaaaaggtttagatgggataggaaataatataggtatttcttggaaatttaaatat

SEQ ID NO: 583 - DNA, 531 bp, Borrelia garinii
gtgttttttttgattttaccattgttttttttattatcttttaatgttttttcgatagatgttattaaaataggcattgttgattttgatagaattgtgattgaagttttaaatcctcaattgaaagctaatcttgatcaaataaaaaatcgctatcaagaacaaataaatacattaaatttagagcttaagaatttgagacagttgtatgataaatcgattgctgataatgatttagacaatgcaagatcttttggaaaccagtataatttgaaagttgatgagctaaaaagattgtctagtttggcaaagaataatttagaacagcaaagattggctaatattaatagtttaaacaataatagtgaatctttaagtaaaatacttcatggtattcaatatgttgcagagattaatggattttctttaattatgaaaaaaaataatccatatattctttatcataacagcacggttgatataactgatagtgttgttaagtatcttttggaaaaggataataaaaatcct

SEQ ID NO: 584 - DNA, 822 bp, Borrelia garinii
atgttaaaaatattaacaaaaataattgccatttcgtgcctcatggtaggatgcaccagtctgtcttacagccctccaaaacaaaatttaaattacttaatggaacttttgcccgatgcgaatttatatgcccatgtaaatttaattaaaaacagatctatttacaactctttaagtcctaaatataaatccattctagggcttataagcgatttatactttagctataaaaaagaaaataacgactttgctctactaataatgggtaatttcccaaaagatattttctggggaattcataaaaatagaaatatagaatcaatagggaatatatttacaagtccaaaatggaaacttaaaaatttaaacatatatattaccccaaacaaagctagaaccagtattacaataaaccaaaaagataaaaccttaaaagaaaacaatatactaacaacaaaatacattaaggaagtagaaaaaaatgaaatgtttttttggattcaagattcaatattgttgcttccaaaccaaatagcaagtagcaaaaacttaatcccttttagcagtggaactctgtccataaacagcctaaatcaaaaagaatatattttaaaatctttgctcacaacaaataacccatcaatactaaaaatattgtcaaaaaagctaattccaactatcttaacaagcactactaatctcacaatatcaagccacataaaggctacaataaaagaccaaaacacagtagaaatagaatttaatattcaaaaatctagcgttgaaaactttatagcaaaactagcttcaaatattcaaacc

SEQ ID NO: 585 - DNA, 939 bp, Borrelia garinii
atgaaaaaaaatattttggcaacatacatattaatattagtaagtttattatcatgtaatataagtggccctaatgaattaggaaacaaaaaaacagaaaaaaaggggggcggggagggtgttttaggctttatagagaaaattcaagaagagagtataaaaggtgttgaacaacatatagaaaaaagagaaaaacaaacgatgcagacggtttctgtaaaacctgttaatgtaaatagaaattttctatattatcctcaagaagaaatagagataaaagaagaagcgttgattccaagtactgacgaagaaaaaagagtagataaagcaattagcgatgggcgtcttgaatttgataaattagtttatgacgaaaataagcttaaaaatgaatctgagcaattagaatctaattttaataacgtttatgatgaaatctcaaaacttaaagatgcaatacaaacagaggcgcatattgtaggaagaataaaccatataataaaaacaagacctgaaaaaagagaatatcagaatagagtaaggcaaaatcagtcagaaaaacgaactctaattaatttgttcaatcaattattagaaaagagagacgatattgaggaacttcatactcaattagatagcggacttagcgaaagagcatctgcaaaatacttttttgagcaatctcaaaaaactttaaaagatgccattactgagagattaaaaaacgaaaatagaagttggtcaaaaagatcatatggtggtaatttaacaagaaaggcaaatcgtgaaatagataatgctttagagcaattaaaaacttcttcttctaagataattaaagcaatggaaataaagggaaggatagagcaacttcttcaagaagtaaaatccttactggcttcttcaagaagtaaaatccttactggcttcttcaagaag

SEQ ID NO: 586 - DNA, 516 bp, Borrelia garinii
ttgaaacaaaagattattatatttaccatattagcatttctgtttaattgtacaaacaaaaataataatgctgcgctaaataacgatttagatgaagaatctcaaaaattacaatctaaatcaaatttagttaatgacaatagagttgaatttagcaaaacaacacctttagaaaaattaataagcggattaaacttaaacgatgctgaaaaagaaacactagcatttttaataaactcattaaaagaaaagctagcggactcaaatattggtgtaaattttaaaaatactggtggagatgagagtaaaatagaagagactgtacacaaatttttatcggacctaaaagaagatgaaataaaagaaatgcttgcaaaaattaaaaaaaataaagacaaaaaagaaaaaaattctgaagagttaaatacttataaaaacacacttgctggtggatttgatggaatgtttaataaaacagattccaaaaccacatttaataaccttaaagacgctgca

SEQ ID NO: 587 - DNA, 819 bp, Borrelia garinii
ttgactttaatttttggttgttctttagataataattcaaaaatagggaaagagggtggcagacttattggaggaaatgagtcagataggctaggtcaaaaaaaaagggctttagattcaatgaattttaggtcactctcagatggttctagtttagtgtctgattctcaaaatcatgagactttaaaagcgcttgagaataaaaataaaattattgattacagccaaatacagtttttagaaggaacaaaatcaatctctgtgtatttatggcctgttgatattcgttggataaaaattaaagccagagatttgtttaatgagcgcggaaattctattaaagaacttaagggcattaagtattcttatcttgtttctcctgtttctggaagctacatttcttatgccatgcctttaataatttttgagactacttgtgaaagtgatccaatttattctgtttctggatttaaattaataagcaaaggaagcaatataaactttaatgaaaataaaggaggatttctagtgggactcccaatgtctgaaaaatcagttgaatctgggcttgtaactgcatatccttttggttctaacaatgctaaaaaagtagttgaggcctttacctctctttatagtaatggagtttggagcgatatgattgctgagattaccattaagtttaaaaaacctccacaaactgaaaaagtttacagaatttcacttgattctaagctttttaatgttgctatgaaaaaaatagtcgaaaaatatcctcaaattaaaagcgcaagttttgcatttaattcgttgattaac

SEQ ID NO: 588 - DNA, 570 bp, Borrelia garinii
gtgtactcaattgtaaaggaggatcacatggacataaagataaataaaagaaatttatccgagagcattagagaagaagaacaagcacttattcattataataagcttaaagaaaaattaaacatcaattttcaaaaagaaatttattgtaaactagaggcaatgaaggttttaaaagaaattaaagataaggaatattataagttagataactattctacctttgatgattttgcaaaagactatagacttgccagaactcaaacatataagtatcttaaaattgcaacagcaatagaagaaggattaattgaagaaaagtatgtggttaaaaacgggatcaatgaaacaatttatttgcttaaaacaaaagaaggtccgagtttaagaaaatccaaccaaaacccaataaaaccactaagatttcagctcaaaaaggaagaatcttattctttttataaaaaaaatgccaagcttacgagctttcttttggaaaaaattttttttgaggaaaaagattttttattgaaaataattgaagaatttgaaactttaagaagcaaacgaaaa

SEQ ID NO: 589 - DNA, 525 bp, Borrelia garinii
atgactaaatatattaaaaatttacttaaactaactttaattgttgggctgttagtagcatgtagtttaacaggaaaagctagactagaatcatcagttaaagatattacagatgaaatagataaagctataaaagaggctatagcagacggcgtaaaacttaatgagctcgaagagaataaaacaggtgccaaaaaggggggccctcaaataagagacgcaaaaatacgcgtcattaatttatcagtaaaattcctaaaagaaatagaagaggaagctaatatccttaaagataatgtgggaatgaataaagtagataaagatcaattattaaaagacatgtatgacttaatgcttaacgctgcaggatcactacaaaagcttggattgcaagaaatgataaaaacagtcacacaagcagctgaaaaaactcctccaactacagttgaagggatacttatgattgcaaacacaattgaagacaaattaaaaaaaattaaaggaaaacaagagacaaataaaaaa

SEQ ID NO: 590 - DNA, 1584 bp, Borrelia garinii
atgataagaaaaaaaatattacttttaacactactcattgcagctgcaagctcgtgcaaaatttctaaaacaaaagaggatcttgcctttggagttggaattggaaacgaaccatcatcacttgatccacagttttgcagcgataaattgggtaacttaattataaacgagctatttatagggcttttaaggggagatcccaaaacaggtggttacaggccaggacttgctaaaaattgggaaatttctcaagataacacctcttatacattccacttaagagacgacatttattggagtgatggcgttaaaataacagcagatgccattagaggctcatacataatggctttagaggctgaggagaatctcccaaatattaacctcttgacatcaaaaataaaaaatgcaaaagaatttcacacaacaaaattaaattcagatgaagttggaataaaggtgattgatgaaaaaaccttggaaataactcttgaacagccaacagaatatttccttgatatgattacaaatccaatatttatacctattcctactcacgttgttaaaaagtttggaaataaatggacaaccccagaaaacatggttacaagcgggcctttcaaactaaaaagaagaatattaaacgaagaaatttctcttgaaaaaaataaaaaattttatgatgccaaaaatgttgatattaatgagcttacatttgttactataaacgatgcccgcagaatttacagcatgtatgaacacaacgaaatagatgctatttttaacaacattccgttaaatcttattaatgagcttattttaagagaagatttttattcatctgacattaaccaaattggttttctttcattaaacctaaatgctaaaccccttaacaacccaaaagtaagagaagcattatctctagcggttgacagagaaacattggtttacagagtgcttgataacaactttaaagcaacaagaaaggtaagtcctaacattaataattataattatggaaaaaaattaaaaccatataacccacgaaaggcagaaaaacttttggccgaggctggatatcctgatgggaaaaaatttccgactattacaataaaatatagtaaaaatgaacttggaaaggaagttgccaattttattcaaagccaatggaaaaaagttttaaatattaatgtagaagtcgagactgaaacatggtctagccacgtatcaaatattctaaaaggacagtatgagatctcagtaagatcctggcaaggagattatttagatcccatgacattctttactatatttgaaactaaaaactcacatctttcagcttacggatattcaaatcctgaggttgacgaactcttaaataaatctgagtttgaagtcgacaaaaaaatcagattagaaatatttaaaaaagttgaagaaataattattgaaaatgatcatccaataattccaatatacagtgttgcagggaactatcttttcagaaatgataaatggacagggtggaacacaaatgcttcagaaagatttgccctatcagaaatcaaacctttggaagaa

SEQ ID NO: 591 - DNA, 681 bp, Borrelia garinii
atgaaaagaataagtattttatcaatactactgttattattgttgttttcttgtaaacagtatggtgatgttaaatcattaacagaagttgctactgatcttgaggatgacaattcttttgcttctgggagtgtagagtctaaagatcaaattatcgaaaaaggacccgttttaacatcagaggagtttgaaaggttagaggctttaaaaacctttttaaaagacgcaatgggtgttaatggtagagaaggcgatacaaaagctgagtatgagaaatcctataaagaattttttgattggctttctaaggatgttaacagacagaaagagtttgtaagtttttttaacaatatttgtggcattattactaaagcagtggatgcaagcaaaaaaaggtataatagtaatccaaaatccttaggttttaatgaatatgtttgttatgatattaaaaccaggactggggatgatttaagtttatttttccaaaaagtagctgatgcatttggcactcaagagtacaaaaataaagatgaggatgatgagaacaatcaaaagcctgaaaaatgcaatgaagagatttttaaagtaattaaaagagtgtttactgaaagcgagaataataacgaattggcaaatttaaaaaatttaaatagttataatttaaatagtaataataaa

SEQ ID NO: 592 - DNA, 1137 bp, Borrelia garinii
atgaacgcgaatgataaaaacaaagccttaaatgaatataacttaaaaaatatttcagaagttattaaaaatagcttacaaattgaattagactttaaaaaagaacttgaagcaaaaacaaatcaaagtatcccccctattttagaaattgaaaaaattgaacctgaaaaacaagaattttccttaaaatctgaatctgaaagcttaattcccctagaaatactagaagaagcaaatgtggtcaaatcagaagaagaaattgcaaaaatacaagaaaaattattgttaatcggagcttctgatgaaataatagtacaagaattagaccccaatattcaaaaatctttaaatccaactacaatagaattcaaaattctaagcaccgccgacgagaaaacaatacttgatccaactgaagaagaaattaatactaatgaaaaagacaaaatttttgatcaaaaaaaagaaaatagcactttaagcggaactgaaaaaactccaatacaaaatcaattccaaaagcatgacgcatctttaggtaaagatggcaacttaataacaaaagaatatgcagaacaagttagaaaatctctagacaaagcactaaatgcaataaagagtttagaaaaatctaaagatcttttaaatcttgatgccgaaaatttactaaaggatccggaaaattctaaaaacaaaacaaacagctcaatctcaaacaatattgataccaagaacatagaaaaaacaaaaaataaattccttgaagagctagaaaaaagtgagcttagttttgaagacactaaagatcccttaggaataagcaccataaaagaagtaatagatgctgccaacaaatggaaagaaaaagaaaactcaagccaaataaactggaacttgggatcaaagtttcatccaaccccaaagctttacaacgaatcggtagctagagagtatgaagttttggctgaaaaattcactaaagtaaaaaatgaatacaaaaacacaaaagaacaactaaaagttcaacctaaattaacagctaacaacctcagcaaaataattgatgcaacaaaagagtttgcaaaccaagtaagaaatttaatcttattggtagaaaataatcaccaaaagccctat

SEQ ID NO: 593 - DNA, 855 bp, Borrelia garinii
atgatttataagatattaacgctatttaaaataaccttgctgttctcatgctctttttattctccatcaaatagcgaagaagcaacaaaggaattgcaatcaaacctcattgctaaaaactttagtattaataaagcagaaaatttgaacaatttacaacaaagccaactttcaaaaactaaaaaggaaaggataattaaaaaatttattcaaagattaaatgaaaatgaagaattaattgaatcaatagaatcaaagattgaaatatctactcaaaaaacaaatcaagatattcaaaaaattgaacctattgatcactttggaataaataaaaacgcattcccggaaaatactggcgcctcaaatattgacttaatgttaaaaaagaatgaggctagaagattattttattcatctctagattatgatgaaaataaaatcaaaaaattaatctcaatactagcaaaaacatcaagctcaagtggctaccattataatattattgacgcatttttttggaaaggatttaaaacccaagaatcattagaaacagttgtcaatcttttaactaaaaacgagctaagacgcctaatattaaactttgaaacaaaaacagtaaaagatattcaagaaaaatttgaaaaactaatgcaaaataaaaatgcttggataaaaatcgtagaagaagttattagcaaatatggaaacaatacagcaagttccagtgttgatagaataattttaggagaaatgataaggcttggatacgaatataaattaaacccagatgaaagtatgcgcattacagagaagatgaaaatactactaaaagcctgttgtgatcacatacactac

SEQ ID NO: 594 - DNA, 1095 bp, Borrelia garinii
atgaaagaaattggaatatctatataccctaatgtaagtcctaaaaataaaattatcgaatatcttgagaaaagtgctcattttggatttactcaagtatttacctctttactctatattaacggaaatgaatttaacatattcaaagaattactgaacattgcaaataaaaacggaatgaagcctattattgacgtaagtcccaaaattttcaaagaattggaaattgatctttcaaatctcagaaattgtccaaaactagattattttaaaaaacttggtgcttgggcaattagattagacaatacatttacaggcattgaagaatcattaatgacttttaacgattctgaccttaagattcaacttaatataagtaatataaataaacatattgacacaataatgtattttaagcctaatataaaaaatttgcttggatgtcataatttttatccccacaaatatacaggactttcaagaactttctttaaagaaacaacgaaaatattcaaacattattcaatcccaacggccgcatttattagttctagcaatgcagaagagtgcgcacgaggaaaagaaaaagaaggtgtgcctacgctagaatcacacaggtctaaagatatagaaacccaggcaaaagatctttttaaagaaggaatagacactgtcctaatttctaattgttttccaagtgaaacagaattaaaaaaagtatcaaaagtaaacagaaatgttttagagctcaaagcagacctaaatccaaaagcaactccagtggaaaaagaaataatacttgagaatttacattttaatagaggagatattaattcttatagaattcgatcaactatgccaagagtgtactacaataataaaaaatttcctgtacattctccaaacgaaatcaaaaaaggagacattttaatagactcttcagaatatttaggttatgcaggagagcttcaaatatcactaaaagataccccaaataatagtcttataaacgtagttgggaagatagtagatgaagaaatatatctgcttgaaaaaatagaaccttgggaaaaattcaaaataatagaaaataaa

SEQ ID NO: 595 - DNA, 1599 bp, Borrelia garinii
atgtttgatatgaaaatgttgataaaaaagttaaaagctatattatttcttaatgcaattttatttatttcttgttttaaggaaaatgatggacacaaattggcgtttaagctaaatattggaagtgaacctgtcactttagatgttcaattaataaacgattctgttggatcaactattgtaagtcaaatgttccttggtattttagatggagatcccagaactggaggatacagaccaggacttgctaaaagctgggatatttctgatgaaggaatagtttatacgtttcatttaagagataatcttgtttggagcgatggaattgctattactgctgagggaataagaaagtcttatcttagaattttagacaaagaaaccggttcatcttttgttaacattattaagtctactataaaaaatgcagaggagtattttgatggtaaggtgaatgaatctgatcttggaattaaagctcttgatgaaaaaactttagaaataacgctaaaatccccaaagccatattttcttgatatgttggtacatcaaacatttgttcctgtaccagtgcacgttattgaaaagtatggacaagagtggacaaatcctgagaatatggttgttagtggtcctttcaaattaaaatctagagttttaaatgaaaaggttgttcttgaaaagaacgataaatattataaatctaaagacgttgttcttgacaatattgtattttttgtcacagataatagcattacagcttataatatgtatttaaatgatgaactagatgcaatttttaataatgttccaccagatttacttaaggatcttaagcttagagacgattattattcaataggcattaattcaacctatttttattctttgaataccaaagtaaaaccgcttgacaatgttacagttagaaaagcgctatctcttgccattgatagaaaaactttaacagagagcgttcttaatgatagttctattcctacaagaagagcaactccagattatattgattactcttacaaaagcaatttaaatttatttgatgctcaaatggcaaaaaagcttttggtagatgcagggtatcctaatggtaaaaatttccctttgttgaaagtaaagtataatgtaaatgatagacagagaaagattgctgaatttattcaaaatcaatggaagaaaaatttaaatattaatgtgcagcttgagagtgaagaatggtcaacatatataaatagtagggtaaatggtaattatgaaataataagggcagggtggttaggagattattctgatcctatgacattcttaagcatctttaaaactgaaaacacgtctttttcatcttatggatattcaaattctgaatatgataaacttttaataaaatcagatcatgaaagaaatatttttaaaagacaggaaattctaaaaaaagcagagacgataataatcgaaagagattttccagctatctttattaatataatttcttctagttatctttttaggaacgataagtggaaaggttgggaaccaaatatttcacaaagatttgatttatctgtaataaggccaattaaa

SEQ ID NO: 596 - DNA, 1212 bp, Borrelia garinii
atgacaaataagataataaaagaggctttaacttttgatgatgtgtctttaattccaagaaaatcatctatattgcctagtgaggttagcttaaaaacacaactgacaaaaaacatatccttaaatataccatttttaagctcagctatggatactgttacagaaagccaaatggcaatagctattgctaaagaaggaggaataggaattatacataaaaatatgtcaatagaggctcaaaaaaaagaaatagaaaaagtaaaaacatacaaagtccaaaaaactattaacatcaataaggatataaacgaacaaacaaccaaaatgcttttagaaaaacaacatctagaagaatctaaaatatacaaaaatgcagaacgtaaagaagatttccctaatgcatgcaaagatttaaatagtaggctaagagtaggcgctgctgtttccattgatattgacaccttagaacgagttgaagagcttgtaaaagcacacgtagatatacttgtaatagactctgctcatgggcattctacaagaataatagagcttgtacaaacaattaaaaacaagtatccaagcttagacctgattgctggaaacatagtaactaaagaagccgcattagatttaatcaatgtaggagcagactgtttaaaagtaggaataggtccgggtagtatatgtacgacaagaatcgttgcgggagttggagttccccaaataacagcaatctgcgatgtttatgaagtttgcaaaaacacaaatatttgcattatagcagatggcggaatcaggttttcaggagatgtggttaaggcaattgcagcgggggctgatagcgtaatgataggcaatctctttgcaggagtaaaagaatctccttcagaagaaataatttataatggtaaaaaattcaaatcctatgttggaatgggttctatttctggtatgaaaagaggctctaaatcaagatattttcaactcgagaacaacgagcctaaaaaattagtccctgagggaattgaaggaatggtcccatattctggaaaattagaggacattttgactcaactaaaaggtggattaatgtctggaatgggttatttaggagcaaacacaatatctgatttaaaaataaattctaagtttgtaaaaataagccattcttcattaaaagaatcccatcctcacgatgttcttaatatacca

SEQ ID NO: 597 - DNA, 621 bp, Borrelia garinii
atgaaaaagaatacattaagtgcgatattaatgactttatttttatttatatcttgtaataattcaggtggggattctgcatctactaatcctgatgagtctgcaaaaggacctaatcttaccgtaataagcaaaaaaattacagattctaatgcatttttactggctgtgaaagaagttgaggctttgctttcatctatagatgaactttctaaagctattggtaaaaaaataaaaaatgatggtactttagataacgaagcaaatcgaaacgaatcattgatagcaggagcttatgaaatatcaaaactaataacacaaaaattaagtgtattgaattcagaagaattaaaggaaaaaattaaagaggctaaggattgttccgaaaaatttactactaagctaaaagatagtcatgcagagcttggtatacaaagcgttcaggatgataatgcaaaaaaagctattttaaaaacacatggaactaaagacaagggtgctaaagaacttgaagagttatttaaatcactagaaagcttgtcaaaagcagcgcaagcagcattaactaattcagttaaagagcttacaaatcctgttgtggcagaaactccaaaaaaacct

SEQ ID NO: 598 - DNA, 204 bp, Borrelia garinii
atgcttaaactggtaaactacttattacttgctttactactatgttgtactaccattgctagcctaccagatgaaccaaaaccaccaattattcaaaccctaggagctttagccaaatatgaagcacaactatcagattatgttatgtatcttgtaatatttttatcaaaaacaaaagtaaaagttaatgatccaaattatcca

SEQ ID NO: 599 - DNA, 3243 bp, Borrelia garinii
atgaaacttgatgaaataataattccgctatcaatgtcgatcagcaacaatcaaaagctggactcaatagcagaaactctaaaaaaaattgccgagcaaaaatttgcaagtctagataatttgaagtcaaaattagaaaaatctactgcatctggatcaaatttggaaaaagctttgaataaaagctcgcagaacgctagtaaaaacttcaagtctcttgcaaattctgtcgattctgtaaattccaaagctagtggtatgaaaagtataggcaaagttctgaaaagtgttgggaaaggcttaggaagtgtaaagaatttggcaaacaaaactggtgaagcattcaaccaaatgttggcagcttttgccccaattattatagctgtaaaggctctacaagcaattggctccacaataagtggaattttcgatggcgctatggatgctcttgatgaatttaacgaagaagtgtcaacgttttctgacatgcttggaaatgaagaacttggaaaatctttagcagaatccatgagggcttttggcgatgaaactctttttactagagacgctattgctaatgctactaagacaatgctttcttatggtgcaactgcgagtgaagttgaagagagaattagaatgtttggggaggcagctggtggaagtagcgaggggcttgagaaattagcagaagtatattctcgtgtagaatctagtaatcaagtaaatttagaagatttgtatgcgcttcgtgacgctggtgttgatattacagacattttagcagaagaagctggtttagctggagaggcattatataaggccgcgagcgatggacaaatagggttcgaagccttaaataaggctctttctaaggctactagcgaaggtggtaaattttacggaaacaccgctaaagaagcaaaaactttatcccaagctcaacaacaaactgctaaaatgagcgaaaagcttttcttagatattgggaaagctttagagccaatgatgattggatttgaaaaagtaaaacagtttcttctggtggcgatcatggttcctttgaccaaagtgactacagcgacaatatacttaactaccaaattgggtgaacttgtggtatatctttccggcaagtggttggaaggtgtaaaaatgtggttcaaggcaatctccacaccctttgtcaaattgtttgaaggaatcaagtacgtattcaacaagctaaaagaacttgcaaaatatgtttctagtgtattcccagagcgtttcaaaagtgcattcgaaccgatcattaaatggtttcaaaaattgctggatatggcgtccaaagcatacgaaaaattcaaaaatattattactttttggaagaaatcaaaaaaggaagaagatactcccagctccgaacccgagagggacaaaaaggttgatccaaatgcaaaaaccgattacaacaaaaagattgagcaagactataagaaattgcaagacgaaatattttttgcccaaagggaaatttacagtaaagtcggcgtggagcgagaaaaagccttaagggagcttgaaaaaaccatcaagaagaaaaaccaaaagtttctaaatacgtactccaaaagatttgatgagttatcggacgagaacaagaaaattttagtcggggttgaaaaagcagtaaacgaattcaataattctaattatgattttgtgaatgagtatcaagaattactaaaagaaaaagaaagtcgtgaaagaaaaatactattaaccctaccccatacagatcaagaaagcgctttacagaaactgaatgacgaaatcaatggaaagaacaaagcgttcgtagaaaaatatggaaaaagcttcgaaactctgaacgagtccaacagaaaaattgtagccgaacttgaaaagaaagttaaggaatttgaaaaagctgctttagatcgatcttttgtcgaggctcaaaaagctctacaaaaaaacatactagccttagagtgggaaacaatgctacttccagcaaaagaaagagcaagtgctgaaaaaaagatggcatccgacattcaagcaatgtacaagaaattcgtggatgagcacaaatcgcaattcgacaatctaaatgaaaccaacagaaacgcactaaaacaaatggctgagaaagctaaagatactgcaaaaagcttatatgacaaatgtttagaaaatctagataaatttacggaatttacaggcaaaattttgaatcaggaagtgggagaaaaagccggttctgaaggctttgattatgctgcagacagtgcaacaaaggggttggttgattttgggaaaaatacgttgaaagctgttggagcatcttttggacctgtgggccaagctattgcagaaattgtcatacaaatcggagagttcctatggggatggttcaagggtgccgaaaaggccagaattaaaaaaattgaagaacaacgagataaagatttagaagaacttgaaaaacgaagcgaaattgaactaaagaagcttgaagagaaatttgatgcagaaattgcaatgagaaaagaaaaattgagtgaattagatgatgaatactctaaagaaatagagtttctaaaacaagcacaaagtaaaggccaaatatctggtgaagaatttcaaaaaagattacacgatgtacaaacagaatataaaacaaaaaaaggcatagaaaccaccaaacttactaaagtcgaagagactaaaaaactagaagtggaacgacaaaataaattttccaaactagaaaccgagcgaataaaagcacaagccgaagttgataaggtaaatactcgtatgtggtcttggtccaagtcttccgatttagaaaaggcacagaaaattttagacgaaatactaaaaagaattgcaacagtaaaatcggccggatctattgaagagataaaacttgctcgtggcggtgcacgatttgtttcaaataaaccgacatatatgccaaactcaggtgtaatgtctagtgaatttggccaacccgaattggtaagaatcactcctgcaccaatagatgaaaatctacgcaaacttgaagctaaaattattgcagaagaaattgccaaattacaaaaaagccaaagcagtacagttgtaaataatttttactataacttcaatgggaatgtgcttgatgctgaaaaattagttagaatgctaaaatcaaaagaacatctaatgacatttcgaatggctgaa

SEQ ID NO: 600 - DNA, 426 bp, Borrelia garinii; identical to SEQ ID NO: 94

SEQ ID NO: 601 - DNA, 1188 bp, Borrelia garinii; identical to SEQ ID NO: 95

SEQ ID NO: 602 - DNA, 780 bp, Borrelia garinii; identical to SEQ ID NO: 96

SEQ ID NO: 603 - DNA, 2622 bp, Borrelia garinii
ttggaagaacaagataatacagtccaaggaattgacttggaaagtccagaaattactggccaaaatccagaaatatcaagtgccaaagaagatacaacacaagattgtacttctttggggtttgacattgtattctacacggatgaaggtcaaatttttgaacttaccccttttgtagatatttcaagcattgtattagaagaaaaaatagtagacccaagcttaaaaacagcatcaagcaatttcagcttcagcgtaagtggcctatcagaagattttttgaatttcttatttttcagaaacgaagatattttcgtaaaagtaagcgacaacaaaaaccccgtatttacaggaattttagaaaaatttttcagcagagatttgttcaatagcaccaaaagtgtatcgttcacggtcaatgactactctagcctactaaagattgcattcgaaaatccagttcaattcccaatcaatttttcaccagactggcttttcgtatacaatcctttggcaaaagagctctcacttgtccacctaataataggaaaaactaaactgaaagaccttattgatgatgatgctagcgaagcaatacttgacaaagtccccgctgtaatcattgattgtggagaaaatgtagaaactattttacaagccttgctttacgaatttggatacgcatacactttctctccaattggtaaactaaaaattcttccaatttggaaaagtgaagtaatcaacagagaaattgaaatttgtactatagatgccgaaagttatgttatgtcaaaaagtagctccagtagctacgattcaactaaagttatttggagagaaggcaaattccaaagcaaagaagaatcaatatccaaaaaacgaccactctactcagcaccaatcaatgttgctggtaatgatggcaaactttacgttgcagttcttcaaaaaggcgtagtgtaccccgactttgcagacaaagtcggcagcagtgtttttcaagaatacgaccctagttggctagacacagtttacaaatgggacttcaaaaggcgtgaagtttggcacgaccactacgccataaatgaacatttagcaataatctcaactcataaccttgaagcaaggtttagtgccgactcctccatcaagcttgaaaataaagaatattttccaacaaaggctaaactttggtttagaaacacttctagtagtcaaggctccaaatatatttaccactttgatatctacggagatgttttctacacaatagctcaaaatgtaattcaaactgacaatgctgatgatttttactctaaaaagtttgaatacacaaccaggttcattttttccgaagaatccgcagtaagactttttgaattcctaacaaacttacgtgtcaaaggacacactattgttaattttaggtcaatgcaaaatctaaacataaccgattttgtcaaacttagacctgacaatattgggattgatcattttttccttatactttcaaaaaaaattactaactttgatctagatatcaagctttacgaatacgaaggaatcacctggggtgactacactcattacgaataccttacaacttcaactaaaatatcagtaagcgactacttgtctggggtcaacaaagttgttattgcaccgtttaattacaatggcgctgaaactttccagttcaaagctgacggattcaaagacgaagatactctaaacaccgcaattgaatttgcaaaacaagcaggacttaacaaaatcaaactcctcaacggagatttttacatttacgatcaagtaaacctaaacaatttggaaatccaaggcaaagacgaagtgacaataagaagtacggggttttcaaaacatatttttacatcagaaaaatcattcaagctttccgggattagcatatgccagcagccattaagcgagctctacattaacggaggcactctaaatcaagaagaattgtcaatgtacctagaagacaaaagctttacacatccccatggtgtagtcttctgctcttcatattcagtaaaagaaaatgccagatcatcagtctatgttacagatgtaaattttgtgtacatcaaagatgtcacatttcgttgtgctctaaacaatgcactgtatttgaaaaaagtaaaaaaaatcctgctagaagatgttgattttgactctgcaaaccaaggtttcgaaatcagtgacgctaaaaatattacgctcgtcaacaccaacatcaaaagcagcaaaaaagaatcggttgcaagcggatacaacattatgatcagggaaagttcttttgaaaacaacaacaatgcactaaaactttcgaatttctcaagcgtaaaaatactagattctcagctcagtaaaaacaaaggtacagcacttcacttagttgacattactatcgcaagactaaacaataatgtttttgtcgaaaacaaagtcggacttgaaaatcattcttttgacttaatcattcaagacacttttttgaaaaacacacttgctcttgatctatcagattcaaaaggaagaataattgatagtagcacttattcagaaaatactaaagacaaacaggaggccgct

SEQ ID NO: 604 - DNA, 255 bp, Borrelia garinii
ttggggaccttaaccgagtacgtttacaagttcttggatgagtggattcagaagaaatacaacgctaaactgggatttactattgagaaggtagatggtcttgaatatatttgtaaggcaaaaagatatgctagtcttaagaagatattaaccaaaatttttaaagattataaagatatatttcttggtaggttgcagaaggctcctggtgttgcggcagttcccggatcgacaggtaaggggcaaggtggaagt

SEQ ID NO: 605 - DNA, 537 bp, Borrelia garinii
atgaaatcagtgttgacaataacaaatgttactgaagaacaaatctataaagaattcttgcggctgggaatggaacaactaatagctcaagatttgtcaaaaagatattatcacaatgagcttacatatagagatttagaaaatttagaaaaacaatttggaataaagattgataatcttgtttctaagattgatagtgtagaaaagaatttaaataccaagattgatagtgtagaaaagaatttagataccaagatagatggtataaaaaacgaatttaatgccaaaatagatggtttaaatattaagatagaaaatctaaatgctaagattaatagcgtagaaaagaatttaaaacaagatatgtctaatttggcacaagatttaaaaaaagatattcaaattaatagcaaattattattggaaaaactcaaggtaagtaacagaataataattcttattacagtattagtagttcctattgctatatctagtatggcaaatattgttatgtcgataattggcagctatctcaaa

SEQ ID NO: 606 - DNA, 3582 bp, Borrelia garinii
atgaaaactaataacattgtaaaaacaaatgatccatatatgtctctttataaaaaactatcaaaagattttataaaaaaagagagtattaataaaccaaaagacttttttattcttataaagaataaactttcttcaatagatgataattcaacagaagcaaatatagagtctttactaagatctatatttgaagaactaaattattcagtagaacaacaaaaagtcggacaaatagaaggagtggagtctagagtagatatactactttttgaaaatgataaatacagggtagattttaataataaattagaagaagctaaaaaaaataatgagcctattctgactaaagatatcttgcttatagcagaagttaagcgcccatcatttagttttaatactaaaaataaagtaaaagaagcagaagatcagctatatagatatctgaatcaatatcaaaaacattatgggatactttcaaatggaaagatatggagattatatgacaaatctaaagtcctttatggagaaaaaagatatattgaatttgatttttctaaaattgaagaaaaagaagaatacaaaaaacaagaatggtttattttattcatctaccttataagaaaagaaagatacctaaagacaagcaatgtaatagagattgaaaaagaagaaatatctaaagaaaaagagataattcaaaaaaccctgagagagatactttatgagaggcccgacgactctatagtatttaaaattgcaaaaaatatatatgacaaagaatttaaagtatcaggcaaagaaattactcagcagattttagctagcatacttgaagaatcaattatttttattttaagaatattttttattgcatatattgaagataatgacatatttaagaaaatattagaagaaaacaagctatacagatcttctatatcttttagatattttttttatgatgaaaatacaaaaaagaaattaggatataaaaaaataataacaattttcaacttgcttgataaaggaagtgatgcaataaagtttcctatatttaatggaggattatttgcagaagacaaggttaaatatttaaataatgaaagtttactaagtattagtgagcttgaagaagtgctagttaaaatacttttctttgaagaaaaaaacattaaagatgaaaaatttgtagagtattcaaagttagatcccaaaagttttggagaattatacgagactctacttgaatatgatctaagaattgcagatactactgttcatcgtattgttgaagacgaggtttatctcattcgtactgaagaagagcttgaaaacaaaaaagtaaacaaagttgctacatactataaaggtaatatttatctcacatctagatcgcttaatagaaagaaaagcggagcatattatactccagatgacttaactgactttatggtcatatcatcaattgaagaacagcttaaaaccaaggcccctttagatataaaaatcattgataattcttgtggatcagggcattttttaatttcttgtttagattacttaacagaaaaagtatggtatcagctagataaatttgaagatgtaaaaaaagagcttgataaagaatatagagctattcttaaagaaagtgaagaatatgatgttcaagatagtataagtaaagaattggtacttaaaaggatgctattaaagaagtgtatttatggtgttgatattaatcccatttcggttgaaattactatgctaagtttatggattaatacctttatttttggaacgccactaagctttattgaacatcatatcaaagtaggaaatgccctgctaggatataccaaagatgaattttttgatattacaaaaaagaaatttgaaggtggattttctttatttaaaaaaagaattaaagaaattacaactattttagaagacagttatcaaaaaattaaaggtattaatgatactactaaagaagatatagaaaaatctaaaaagatatacaaagaatatgaggaaagtgaagatacagataatttaaaaataatattttctttacttaaactttattcattatcttttgacaaatctttaaatatagaatttagtgatattgcaactgtaattagtttaattgaaaatattttaagaaataaaacttctagtgaagataaagaaaaaatagagataattagaaaattaagtagctactataaattttttcactatgggattgagtttccagatattcaagaaggatttgatattgtaattggaaatcctccatgggagaaaattaagtttaatgagtctgaatttttctcaaaacatattcctagttatagaaaactaagcataaaagaacaaaataagataaaagaagaaatacttagtaaagatactcatcctttgaatattgaatacaatgaagaaaaaaacagtataagcactattaataatatttataaatttgattttaaagattatactagtggtggtgatccgaatctttttagatactttgttacatttaatttaaaattaataaaagaaaaaggtaatttaacttatttagtcccttcggctctttttagtgaatctagttctaggtcactaagaaaacatatatttagtaagtataagcttaattatatttaccaatttgaaaacaaaaaaagatttaaagatgtggattctcggtttaaatttgtgatatttcaatttagtaatattaaagaatctacatctagttttaaagcaaaatttatgattcaacatagtgataatattttaaaagaaataactagagatttaaaagacaataaagatgatccttataaaggaattgaattaaatatagaccaaattaaaaaactatctcctactcaagagtcaataatagaatttaaaaataatgaagaatttggcttaatcaacaaaatgtttagtcaattcagtgtttttagtgaagaatatattgattttaaaaaaggcttagacacgagtattaagaatcgtaaatctttattaaaagaatatgataatgaaaactttatatttctttattgtggagctaatattcatcagtttaattcaagattttttgaaaataagaatgcaaaagaaagttctaagtttttctggatagataaagaagatttagaaaaaatattagctgaaaacaatcagcatcaaaccgaaagaatattctatagggcaattgcaagaaatacagatataagaaccatgattagtaccttgtctcctcaaaattgttattgtgtatattcaatgtatataaattatgagaaaacaccaatatctatttataaaaaattgtttattatatctattttaaattcattagcatttgattttttactaagaagatttattgattcaaatgtgctaaaatcatgtttatatcaatgtccaatgcctcagcccgaagaaaaagaaattttaagtaattctttatatctaaatcttgcaaaaaatacttctatactgatagctaaaaatgatccggagaactttaaatatttactttacttagacatt

SEQ ID NO: 607 - DNA, 750 bp, Borrelia garinii
ttgaaaaaaactaaacttaatataattaagcttaatattcttacaacgacattaactttaatttgcatctcatgtgccgttaataaaattgatccggaaccaaaaagcaaaaccaataaaaaagaaaacactaaagaatttaaaaataaatctcaaaatccagatcctttaaagacaaaaaatatagaagatataatctcaaaattaaaagcaattggtaaggacctagaagctcaacagaaacaagaaaagatagaaatagataaaattgctgctgcacaacttgattttctagatacttttaaagttggacctcgtgatcttattgtagaagagaatcaaatgaaaatgaaaagaataatttactcatctttaaattatgaaacagaaaaaataaagatattacaaggaattcttgaaaaacttaaacaaaatcctaaagctcataatatacttggaagctttctttatcacatatcatggggtattcaatttaacatagaagagtgtttaaaaggaataagaaaagcaataacagatgaattacacactctaggccaagaaaaagccgaaaggctactaatgcaaatagaatctagcttaaagctaaaacaaaggtttgcaaaaactttaaaagaaactattgaagattacaataaaaatttagaaaacattcaaaccgatgcggaaaaactagtaaaccacatgaatgaaaattataaagaacatgattctttaaagcccatctat

SEQ ID NO: 608 - DNA, 1062 bp, Borrelia garinii
atgaaagttaaaagtaaatatttagctttgggattactttttagttttataagttgtaatttattcacaagagatgaaattaaagaagaatcccctggcttatttgataagggaaactctattttagagactagtgaggaatctgttaaaaagcctataaataagcaaggcaaaagcaaggtttcaagaaagcaaggcaaaaacaaggtttccagaaaagaaccgtctattcatagtctaaaaaagggactctgttataaaagcaatttattacaaaaaaatgtaacgttagaggaagaaagtttaaaaactgaattattaaaagagcactctaagactagaaaagaaaaaatacaaaaacaacaagatgaacataaagggatgactcaagtaagtttaaattcccttagcggtgaaagtggtgaattggaggagactattgaaagaaatgaaattgatcttactatagattctgatttaaggcaaaagagtgccttacaaaccatttcaggctcaaactctatttcatacactgatgaaatagaggaagaagattatgatcaatattatttagaagaagaatatgatgaatatgattataaggaaataagattaagcaatcgatatcaatcttatctagaaggtgttaaacataatgtagattcagcaattaaaacaattactaagatatatgatacttatacattattttcaacaaagcgaactcaaatgtattctacacgccttgacaaccttgctaaagccaaagctgcagaagaagctacaaagtttacaaaagaagaccttgaaaaaaatttcaagaccttattgaattatattcaagtaagtgtaaaaactgcaacaaattttgtatacataagtgaaacgcatgcaaaaggaaaattagagaacattgaaacagaaataaaaactttaattgcaaagatcaaagaacaatctaatttatacgaagcatataaagcaatagtaaggtcaatcttattaatgagggattctcttaaaaaagtgaaaggtgccattgaaaagaatggcatttggtac

SEQ ID NO: 609 - DNA, 957 bp, Borrelia garinii
atggaattatttgatgaaaattattatgcaaaagcagtagcaaatattataggagaagttaaagatcctattatgtataaatggtttttgcctgatcaaattgaagatgttgatctaaaaatgggctaccagagaactgtaaaatgggacacttttctaaatgccaaccctacaacaattgcaaatgaggttaatactatctcaactattgggtttagttctcaagtggtaagaattaattacttaaagctacagtataaatttaggcacttaaagcaaacggctgaaaaattttatactgcagattcgtatattggagatattaataataatctactaccttttgctcaagcttataagcttgcaagtagtgaaattattaagcttattaatcactttgttctaacagggactgtttcaattcagaaagatggaaaaaatcaaaaacgtctacttcctaatatgtatggactacttaatatgcctgatcaagtaaaagaagaagttacaagtggcgataaggataagatggataaaatatttgaaaaaattgaagcaggactttcaaagttagagctgggggacgaattttctacacctatgatggtaatagttgatcctgcaacttcattgaaattggtaaaaccatatacaatagcacaagctccagtaatgagttgcgaaaaatgggaagatgttttgattcaaaccattaaggctattaataatagagaagatgtttatattgaaacttcaaacttattaaaacatcaaatactcatttacccattaaacccagctcttattaagtttaaacctagcaagtatatgctacctacaccaaacgagcaagttgataaagactcaactgatattgctcattcatacattgattttgttttaggtgggctgcttgctactaagaagactattttgcaagtggacattaaacaaagt

SEQ ID NO: 610 - DNA, 261 bp, Borrelia garinii
atggaatcggtgttagcaacaaatattactgaagagcaaatatataaagagtttcttcgattaggcatggaacaactaatagcaaaagatttatcaaaaagatattatcataatgaacttacatatagagatttagaaaatttagaaaaacaatttggtttaaagtttgataatcttgattttaagattgataccgtaaagaatgagctcaatactaagatagataatgtagagaagattttcaaaatgatatatctattc

SEQ ID NO: 611 - DNA, 555 bp, Borrelia garinii
atgagtgacattacaaaaattaaacaagagtttgataaaaaagttgctgaaattaaggcattaatgaaaaatccccaacaagacaccgggctacttagtaattccgttgattttagagataaaaacctaatttattcaaattccggtggggtttggactagtagtaaagacaagatagaaaactatccagccaaaggatatccctataagcgaggagttaagcttagttttagtgaagatggttcatcagaatttgaagttgaggctggaggtggggatgatttatacggagtatgcactgatatagacgagtttagtggtatagcaacggtaattccaattacaaataattttatgggatatttaacgtttaagaaaaatggaaacggtttaaacccgggggataagctacattttaatcaacatggcgagcttgaaaagactacgggtgctcaaaaaaccgttaatgccatagcactttcaaaagtacataaactaacagaagatttacatatagtacttgctagtgtttttggaaatagagctataaaaggg

SEQ ID NO: 612 - DNA, 777 bp, Borrelia garinii
atgtctgataaagacaaaagacgtcttgaatacaaagaacttgcaaaagaatcaaaagcaaaaagtaaaatgctagcagcctctcaaggaaaaggacttgttgccaaaattgcaataggcagtgctctaggaaatatcattggcaacgctatgagtaaagcagcaggaggacttttaggatttgctaaaaaagcggttgaggaaaaatctaaaacgaatagagcgaaacttctcaacagtgcgttttttgagaaagatgaacggaatacgattatgggaactcttaaggggatgaaaggatttgagcgcgacttagaaaaagaagagtttttaaatcaagcaagtgtctttaagggtactctaagggacttggggatgctaaatctaactaatttaaaaaaagcagtagagttttcagctgcgcttaaatctagtggcgctatgagcggcgaggatgctgtaaaagctgttaatagtctgcttagtggagagggagatgagctttttgatctactaaaaaagtcgggggttggagacaaatatatagaagatgctaaaaaagcttggcaaagtggcgccgaagtagatctagaatctagaattactatgttggttgaaatgtttaaagattttaaatcttttggcattacgaaaaaagcagatacgaaagaagagattgatagcaatttggcctcagctgagcaaactctttcaaacttaaccactactgttttggatccattacttaaattcatcaaaatggtcactggtttatct

SEQ ID NO: 613 - DNA, 1059 bp, Borrelia garinii
atgaatggaaaaatgagaatgtttattatttgtgttgtttttacactgataagttcttgcaagtattatgcaagtagtgaagatttaaaaaatctagaacaaaatgtaaaaggaaaagttaagggatttttagatacaaaagaaagaattgtttcagatgatccaacagtatatgaaatagcagaaaaattaaaagaagaagaattaaagggtaaaaaagaaaataaagaaaatgttaatttagaaaataaagaaaaaaaagaagattctaataagaatgatttaaaagataatgaagatgctaaagtattaaaacccgagcttgagcatatagctttagagaacaaaaaaccaaaattagaaatagcagaaaaaatattaaaaccagaaataccaaaattgccagtagtgccagtagtagtaaaaccagtagttaaagaaaaaacagaagaagagaaagctagagataaagagtatgaagatttaagaagaagaagaatagagcaatatcaaaaacaagaagaagaaagattaaaaagaaaagcagaaagagaagaaaggaaaaaattaagagaatcaagcggaacttttcttgagagagcgactaaaggtaaaattttaacagtaacaaaacaattagacaagataatcagagatatttatagtattaatccaggatcatcctttgaagaaagaatggaagtatctgggaaagaagttgaagataaggttacgggtgctatttatgatgatattaccaataataattcaagtggcaattctatttattctgaatgggagtatgattttgatgaagaaagtttattaaaaagtcttattgaggaattagaaaaagctagaacagcattaaggagtaaaataaaagagggcaatgaaaataaaaatactgtaataattagtgatattaaaggggatttagaaaaaataaaagataaactaaaagaactaaaagaatatcttcaaagtaatgctaataaagaggaaattcagaaacttgtaaagtgttcaattgatccaaatagtgatggttgtcaagag

SEQ ID NO: 614 - DNA, 351 bp, Borrelia garinii
atgaacaatttagcgtacagaacgtataacatagaaagtataaaaaatgaatttttaaacatagggtttagtgaagaggcaatagattttgtttttctttataatgataattataactttgaatatttaaaagagaaaataattgatgtagaaaagaatttgcaaaaagatatatctaatttagacgttaaaatagacaatgtagaaaagaatttaaataccaagatagatagtgtaaataccaaaatagattttgtagaaaaaaatttacaaaaagacatatctattttagatactaagatagacaatgtagaaaagaatttaaatactcagatagataatgtaagtagt

SEQ ID NO: 615 - DNA, 681 bp, Borrelia garinii
atgaataagaaaatgaaaatgtttattatttgtgctgtttttgcgttgataatttcttgcaagaattatgcaactagtaaagatttagaaggggcagtgcaagatttagaaagttcagaacaaaatgtaaaaaaaacagaacaagagataaaaaaacaagttgaaggatttttagaaattctagagacaaaagatttaaacacattagatacaaaagaaattgaaaaacaaattcaagaattaaagaataaaatagaaaaattagattctaaaaaaacttctcttaaaacatattctgagtatgaagaaaaaataaaacaaataaaagaaaaattgaaagataagaaagaacttgaaaaaaaattaaaggaacttgaagatagcttaaaaaagaaaaaaggggagagaaaaagtgctttacaagaggctaagcaaaaatttgaagaatataaaaaacaagtagatacttcaactgggaaaactcaaggcgacaggtctaaaaaccgaggtggtgttggagtgcaagcttggcagtgtgccaatgaattaggtttgggtgtaagttattctaatggcggcagtgacaacagcaatactgatgaattagcaaacaaagttatagatgattctcttaaaaagattgaagaagaacttaagggaatagaagaagataaaaaagaa

SEQ ID NO: 616 - DNA, 432 bp, Borrelia garinii
atgaagattatcaatatattattttgtgtattttttattctactaaacagctgtaattctgataataatgattcttttaataagaataacaatcgagaagtaaaaagcataaaaaaacgtgatttaagcgaaacagaaaaagcaaaatctccagaagaattacttagagaaaaactatctgaagatgaaaaaagacaccttgattggttaaaaaccgctttaactgatgaaggagaatttattaaatttttaggaaatgatgaatctaaaataaaaggcgcgcttaatcatataaaaagtgaacttgataaatgtactggaaagaatgaagatcaccaaaaaaccatttttaaacaagtggttgaaggagcccttaaagagggtatagatagttttgcagatcaagcaagtagtacatgtggtaatggcaat

SEQ ID NO: 617 - DNA, 552 bp, Borrelia garinii
atgaggattttagttggcatttgtataataacattagctttattgagttgttatttgtctgataagcaggaacaagctgttcaaactttttttgagaatttggaaatggaaagttatgataaagggcctgatgagattattactgaaggtaaattttctaatttaagattatatgtggctgaacatcgtttgttagtcgatataaaaaagactataattagtttaaaagatcctaattatcgcgatgtacctccagtgcctgactataatgaggagtattttaataaattctttttagatctaggctctgatcgatctaaagaactgattaagttgtttggtaggttaaaaaatgagcagaataataaatttaaacacggagtttattggctttattcatgtataagggatttatattctccagatattaagtattctggtgaaggaggacatgaatattggtataatgggagagaggtttttatgcctaggcctactattgatcaacaatattttaaagtgaaggaagtaatagaacagtatgctttaaga

SEQ ID NO: 618 - DNA, 333 bp, Borrelia garinii
atgcaaaataacattattagcttagggcttaatttactatcaagcttaactaacatagctaaaactgatacaaacatagatcataactacattaatacttttaacaaagtaatagattttttctacaaaacatatatgagcacactaaaatctatggaaacagccgagtcaacaaaaatattagaagaaatacaagacatattaaaatacaatattgagataatagaggctatttctaataataaaagtaataaaattatctcctcactaaaagtaaaacgcaataaaatcatgagggaatatattagtatccttaaaaggggtgaaaatgct

SEQ ID NO: 619 - DNA, 693 bp, Borrelia garinii
atggaattagtatcaacaaaaaatattactgaagaacaaatatataaagagttccttagactaggaatggagcaactaatagcacaagatttatctaaaagatattaccacaataagcttacgtatagagatttagaaaatttagaaaaacaatttggtttaaagtttgagaatcttgagttcaagattgatactatagaaaagaatttaaatactaagattgatactgtaaaaagtgaacttaataccaagattgatactgtagaaaagaatttgcaaaaagacatagctaacttagatgctaagatcgataccgtagtagaaaagaatttacaaaaagatatagctaatttagacgctaaaattgatactgtagaaaagaatttgcaaaaagacatagctaacttagatgctaagatcgataccgtagaaaagaatttacaaaaagatatagctaatttagacgctaaaattgataatgtagaaaaaaatttgaaacaaaatcttgacgaaaaactaaaaattaataatcaatttttactggaaaaaatagaaattaataatcaattattgtctaaaaatcttgactcaagcaacagattaataactattatgtcaatagtattagtacctattgctatagctattatagggccttttgttttgtcgctaattaatggttttttcaaacag

SEQ ID NO: 620 - DNA, 175 bp, Borrelia garinii
atgaacaatttagcgtacagaacatataacatagaaagtataaaaaatgaatttttaaacatagggtttagtgaagaggcaatagattttgtttttcttcataatgataattataacttcgaatatttaaaagaaaaattgattgatgtagagaagaatttacgaaaagatatat

SEQ ID NO: 621 - DNA, 519 bp, Borrelia garinii
atggagataatattgaacaaaagaaacctagaagtgctaaatgaagccgaagaacattacaagaagttaaagcaaagattaaaatctagttttcaacaagaaatttattataagatggaagttattaagatattaaaagaaataaaagataacgaatattataaattagatggatacagaacatttgaagattttatcaaagattatcatttagcaaggagtcaagcatatgactatttaaaaatagcaaatgcaattaaagacggcattttagaagaagcttatgtaatagaaaatggtgttacaaaaactcttgagttcttaagaaaatcgccaaatgttttgaaaaaatctaaacaaaatccaataaaacccttaagatttcaacttaagagtcaagaaagttacgacttttataaaagtaatgctaaatttactggatatcttttagacaaattatttaataatgaaaaggaaatgattaaaaaaattatgaaggaatataaacaactgaaagga

SEQ ID NO: 622 - DNA, 540 bp, Borrelia garinii
ttggatattaaggtaaacaaaagagatttaagcaataatggaaattatattattgctgatagtgcattaaatcattataattctttaaaagaaaaattaaaaattaattctaaaaaagaaatctattgtaagttagaaactttaaaaattttaaaagaaattaaagataatgaatattataaacttgatgggtataaaagttttgaagctttttctaaagattatagacttgcaagagcacaggtctataattatttaaaaattgctaatgcaatagaagatggggttatacaagaagaatttctaataaaaaatggcatactggaaacgttaattatattaagaaataaagaaagcaaaacaataaaaaagtcaaaacaaaacccgataaaacccttaagatttcagcttaaaaaacaagaaagctacgatttttacaaaaatcatgctaaatttacagcgtttattttggaagaacttcttgaaaatcaaaaggattttcttaacaagcttttaaaaaaatataaacaattaaaagga

SEQ ID NO: 623 - DNA, 369 bp, Borrelia garinii
atgtttagctgtagtggttttttgacacttgaaggcaaagaaagatcgagctttacggataaacaaagaataagtgttttagagactattaaaaaccactataatggcgactctgaaaaaatatctagagttgacaaatattttgatcgattagaggattctcaaagagatgttgttttacaattgttttcggctggatttgactatataaacgctaaagaatcagaacccacagactcagcaaatagaagcgccaatttagctgctttaaaaagtgattttgaatctaagctaaaaaagcttaattacacagaacaggattttgaaaaattagcagacgaccttaataagtttgttgaatcttctaat

SEQ ID NO: 624 - DNA, 390 bp, Borrelia garinii; identical to SEQ ID NO: 118

SEQ ID NO: 625 - DNA, 1164 bp, Borrelia garinii
gtgagtaaaaaagttattattttatcaatatctataatgatatctattttatcattaagttgtgatctgcgaaaagcaaatgctgagagcggagtagacagcattattagttttggaaaaaattattggaacaatttagcttgtaaatatttaagtggatctgaaaaatctatatttaatgcacttcctaagtctaaaaaaagtcaagtacttgattctattttaaaggaaaaaaatggcgaaggtgctaaacaattattgattaattggggtatagatttcgaaatggcaagttctattgctattaacatagataaagaattagtagagctaaagaattctcaagttagattgttagacaaagattcttatgaagtcagtagtactgtggatttaatgattaagtctaatgatgaaaatcatcgtttattaggccagaatgcatattttgacgttgagaatggcagtggagattacaatgtactttatagcgactttagtagttatgatagttcattagatgctgtcatatcttctgattctgatttaaataataatgataatgcaaataagaattatttaagtaaccagaactatacatatcaagaatatactgataaacaagcacaagaaataaaggaaagagttaaaaaatataaaatttttaaagaaaatgtttataagctttcgcaaactttgagacaatctactttttatgctgaggaattaaacacaaaattatctggaattgataataaagaaagtaattttattttaaaagtagaagatataaaagatataataagattaatagcccgcataaaaatgactcaatacacagagttatcaaaaaaaattcttgataagaacttttcaagtatagctaacgatgaagagtcaaaacgctatgctcttctatataaggatactaatagtacttatcttgaagttagaaaaatactcggcaccatcttaagcaagatatcaagtatagtgggaggatttaaggctaatatagtagatattaaggattctgaaaaaataaaaaaagctaaggagcatgctcagggtgtgcttgacatattaaaattaatagactctggggaaaatgtagaagctattttaacaaaagctaaagaggtagaaaatatttcaaataataaa

SEQ ID NO: 626 - DNA, 471 bp, Borrelia garinii
atgaggattttggttggtgtttgtataataatattagctttattgggttgttatttacctaataagcaaaaacaagccgctcaagctttttttgatgagaattcaccacaaagtagtgatatgggttctaatgagattgttactgaaggcatatttgctaatttaaaattatataaggctgaacatcgtttgttgattaatataaaagagactttaatcagtttaaaggatgctaattataacaatgtacctccagtgggtaatcgctataatgaggagaattttaataaattctttttagacttaggttctgagcgatctaaagaacttattaagttgtttggtaggataaaaaatgataggaatttatttgagaaaaaagtttccctgcttttttcttgtatagaagataattcttcaaatgggatcgattttaggcctattaatgcaatatttgaagatggaaaggag

SEQ ID NO: 627 - DNA, 180 bp, Borrelia garinii
ttgctcgatattaaaaaatatctaattttcattctattatcaaaccttattaattgcaatttattcaataagaacaaaaattcagatcaggtaaacaatattattagtagtcttgatactaatcagaaacaagctttcaaattctttaaggacgaaaatctattaatgacggcacactta

SEQ ID NO: 628 - DNA, 203 bp, Borrelia garinii
atgttagagacaaaggtaaatgaaaataatctgtataatgagcttgttagattaggtatgaataaaatattagcaagtgatttagctactagattttatcataatgaaataacaataaaagatttagagattgttaaactagagcttcaaggttttataaaagatgaaattagtattgtaaaagacgaaattaatgctgtaaa

SEQ ID NO: 629 - protein, 656 aa, Borrelia garinii
MNFNRFLMLFLFNFSVLLGSDTTALGHYQKAHEYYLSKRYYDAIDELVEAIKINPNYYEAYKFIASIYYSLKIYTQAQFFIEKAYKMSNEDIEYKILYANILLKNNKIDQAKKIYSEVLVKQRNNINALVGLASIFEQNGLFIAAANYYLSILDYSQNNYSAFEHLIDIYQRLGMHDKIRHLINKVRVNFLSFPDFHKRVAEFYISINNLGLAEKYALNYLALIESSYKDFGVVGAYRLLALVYLHEFKYEDAIESLQKAILVNKDSDELYYLLGYSYLKFGNIEKAILNLERAKNLKKDLEFYSIALEESFFASNFRNFLKNNSNAKISKHYENEGFKAFKSLDLNKALFNAKNSIDIWPDNDSARFLLSKIYKLMNLDIMSYEQLFYLVKQRNSTDSRILDFYDVVSFDVRKSLFYKYGYKSIADFNKLYDDRTVYRMAIFTQSENKFFGANDLILRYAERVLERNLNIEIVNYNFDYNKNRDYLINNFSEGFSYSRNNNLDLFLIFDFKADILKNTATLLVNVFSGKTGIKVSSFSYDVGGVNYLSNALNSFSKDFHDYLPKKGKILQIKNEDALINLGQVNGVLKGDIFLILKEGALNGETRDSNFIVYKRSDILGEILIEDTSDYISRGTIKSSTFLKDYIQEGATVLVKR

SEQ ID NO: 630 - protein, 238 aa, Borrelia garinii
MNLMLITFNEFKTGISLNDTRAEHLVKILKLKDNDKFKFGILGERNIYHCIYKKDKKLFFKKIFKIEESNKLKKLNVLIGMIRPLVARRIIKELASIGIYEIIFFNTELTQKSYLNSKIFKNNDYEKHLIAGAMQGGTTYLPKIKIMKNLKESLKYIEQENFEIKILLEKDSKKKLIDIEQINNATIIVGPERGFTEKEKQLITQYNFSPCSISSNILRTETAIIAASIITASKLINV

SEQ ID NO: 631 - protein, 315 aa, Borrelia garinii
MKIFFVSSSFIALEVFKEILRHYEVVGVLTLPDKPKGRGQKLSQNVIKVEAIAKDIKVFDPLILDNNTLNSIRDLNPDLMLVFSYGKIFKKEFLDIFRMGCINVHPSLLPKYRGVSPIQSAILNGDCVSGITIQSMALEMDSGNILVQKKFKIRSYDTSYDISKLVSSLSPSLVLEALEKISKGFLGIPQKSSEATFCSFLKKELGFIDFNLSSFEIKNRINACNPWPLVRAKLDYSDIIFHRADFWEIDLYKERKVGEIVDFDPERGLFVNTGKGILFLLEVQRPGRRVLDFKSFYNGSRQLIGRVFSSVGGIY

SEQ ID NO: 632 - protein, 350 aa, Borrelia garinii
LNKPKAFGGSFDKKEIQDKIEKYEKEIHQKNFWNDPKRAQEVIKAQSILKNKIDPWEELINKIKDLSDLCEIVENEKDINSLEIEFNVLEKQYKNLLTISYFKEELDINSAFLTIHSGAGGTEACDWVAMLYRMYSRYAERKKYKTELIDLLEAEGGIKSITIEIKGEYAYGLLKSEVGIHRLIRISPFDAAKKRHTSFASVFVDPVIDEKIEIIIKPEDIRIDTYRASGAGGQHVNKTSSAVRITHIETGIVTQSQSDRSQHKNKDMAMKVLKSRLYEYYKNKEDKKNKSKQEVKKEISWGNQIRSYVFQPYNLVKDHRTKFENSNTTSVMDGNIDNFIEEYLKWKSLN

SEQ ID NO: 633 - protein, 342 aa, Borrelia garinii
MKKKQLILLLFITQIIYAKSYFASDTFFNKYQKLNEKPKKGFYIEYHLIDDTEKLYLYKETNLIKYKTIQIIENTRKITYYDTKDTKRKEEVYDNLNNKIQEIEYDSKGKILETANYFYENGNLISKNLKTINQKPKLIFYSKDENGKLLKITGSNFQIWNYGINGDIKSTYFDIKKSTTKAIKYDDKKRNLNSTIIVNNKIKSKEKNQYLDEQKIVNTVEEANTKIISTYQRNNLIKEETYKNNELIKINDFQYNSSDMIIFQNTKEKDKDQYTNTKIEYEYNKDNQLKSKKIYENDIIYLKTEYHNDNEYEEEIYYNKKPALRVKHKNGKIIEEKPIGTN

SEQ ID NO: 634 - protein, 417 aa, Borrelia garinii
MMLLKLTEITKIAYIIFKNSTNKIALIGSGISLSLVMIPLIIVYYMSSNIMTSTINKYIESEGFSIQIEYNNTNKTNYLKDRLSSFKKKYNYKDLNYFFEKRTYGIIGNNKKQGVLIRAIENEFILENKSIKLIKGTKNLKKDSILIPNQIKNKLNLNLNEKIDILIPNAKNHKILPRIKKFHISGIIETGLKDIDNNLVLISLENENLMSKKFSKSIIGIETNFNSIKNNEILKQNLETEFQEFQIKTFYELYLNKYNNLDISKKLLIFIMALIIIFASINISSSISMLIFENKKKIAILKSIGMNNLNIKIIFLLISLTLSTTFCGIGIIIGNYLTLKISYLINFVDNVLNFFLKIFGEENSEILNSEYYVSEFQIDLSLSFSLTLLSLYMLINILTTLVPLNIVSNLKEKEILR

SEQ ID NO: 635 - protein, 144 aa, Borrelia garinii; identical to SEQ ID NO: 394

SEQ ID NO: 636 - protein, 575 aa, Borrelia garinii
MKTKGKVVGVNGNLVTIEVEGSVSMNEVLFIKTAGRNLKAEIIRVRGNEVDAQVFELTKGISVGDVVEFTDKLLTVELGPGLLTQVYDGLQNPLPELAIQCGFFLERGVYLRPLNKDKKWNFKKTAKVGDSVIAGDFLGFVIEGTVHHQIMIPFYKRDSYKIVEIVNDGNYSIDEQIAVIEDDSGMKHSITMSFHWPVKIPITNYKERLIPSEPMLTQTRIIDTFFPVAKGGTFCIPGPFGAGKTVLQQVTSRNADVDIVIIAACGERAGEVVETLKEFPELIDPKTGKSLMDRTCIICNTSSMPVAAREASVYTAITIGEYYRQMGLDILLLADSTSRWAQAMREMSGRLEEIPGEEAFPAYLESVIASFYERAGIVVLNNGDIGSVTVGGSVSPAGGNFEEPVTQATLKVVGAFHGLTRERSDARKFPAISPLESWSKYKGVIDSKKAEYARSFLVKGNEINQMMKVVGEEGISSEDFLIYLKSELLDSCYLQQNSFDSVDAAVSSERQNYMFDIVYNILKTNFEFSDKLQARDFMNELRQNLLDMNLSSFKDYKFNKLEQALSELVNLKKVI

SEQ ID NO: 637 - protein, 397 aa, Borrelia garinii
MKKVAIIDGLRMPNTKFGGSFKGLDIIDESSKVVKALLKRNNLCEVDEVIVGNVISSGLGQNIARQIALKSSLGDNVPAFSVNKVCGSGLKALELAFNSIVLGNNDIVLAGGMEDLTNSPYLLPRKVRFDGLKFGNFGIEDSIQKDALIDSLNFISMGLTAENLSEKYKITREMQDEFAYNSHVKALKARELGYFEDEIHPLTILDKKTNSSRIVSSDEEIRDNLTLNKLASLNPVFKESGTVTAGNSSSLNDGACFLILASEERVKSLGVMPLAYIGGFESVGLSPLYMGFGAYMAIEGIISKLSLNPSEIDLIEVNEAFAAQALSIEKALFKKYNIASDIINVNGGAIALGHPFAVSGSRILLTLARSMKMKNKTKGIASVCVGGGQGISSFLYR

SEQ ID NO: 638 - protein, 551 aa, Borrelia garinii
MENQKDLQENYLKVLERVELGSRVSGTVINIMKDYVLVDIGYKSEGFIKIEEFENVPKIGDKLEAIVVRIGGELGLILSVEKLDSLNFQDKVDEYIQNKKVIKGKVLAELANGYKIQINENVSGFMPFYLSSKSKDEKLKRGLIVEFYILEASESDGLRLILDRRTLERERDLAKRIELVSSYNEEDVVDGVVDRITEYGAIVKIKNFVTGILHKRNIAFNQVENIEDFVRVGDKLKLKIIKINLQTGKMELSLKALKANPWDSVDIKYKIDSIVKGKVVKILPFGAVIELDSELSGFLHISNFSWIRVIKSPQELIKLGQMVEVKILEVDKENQKISLGIKQINENPWERLTEKYPIGKVIQGVVTNITKTGAFVNIEEGIDAYVSKFDISWLEEIDPEEYFKIGDLVNGKVLEVDRRKRNVRLGIKQLEESPWEDFSKSYKKGDAIEVEIVEKKSKGFQVRVYNKIMGFISKIQLGDTKESSLETFEKLNIGDKLKVVITSIDSKDRSVLLSYREYENQKSREEISSYLFKGNDEESYKPFESLLKRDE

SEQ ID NO: 639 - protein, 629 aa, Borrelia garinii
MTKKILNNKYRIKTILIISLGITLLTIYKYFTLMVLNNSPDNIISLKSNDIVRRGTIYDRNGKPIAFSSKSYSIGTNPQKIENIVNTSETLGAILQIDSRILKEKLSSNKGFLYIKRKIKREESDLIKRIQAEGRLSNIALYPDYTRIYPFRHVTSNITGFVGTDNLGLEGIEFSLNSILVKDKTKQQFLNEELETNNIYLTIDMNIQQGVSKIAKKYFKENNPESLITLVMDSQNGEILSMVQFPQYDANFYSEYPEEIRKNLSSSLTYEPGSINKIFTVAIILESGKLNLEEKFLDNGIYQKQFPSGEKITIKTLNPPYKYIDSTEILIYSSNVGIAYITDKVSNEYFYKKLLDFGFGKKVGFPFPGETKGLLNHYSKWSGRSKATIGFGQEIGVSAVQILQAASILGNNGIMLKPRIIKKISNDKEESIKEFDKEEIKRAISKSSAQKVLKMMREVVNKGGIPNLKIKNLDISAKSGTSQAIDRKTGKYSEEDYTSSILAIYPTEQPKYIIYIVYRYPKKIIYGTRIAAPMAKEIIEFIEYQQNTSAYKKIKMPSKIKIPKTAANYKNKAYLPNFINLSKREAIDILKYYKNTIKIKINGAGFVYKQSIPPNTKLEDIVELELYLK

SEQ ID NO: 640 - protein, 336 aa, Borrelia garinii
MIINHNTSAINASRNNSINAANLSKTQEKLSSGYRINRASDDAAGMGVSGKINAQIRGLSQASRNTSKAINFIQTTEGNLNEVEKVLVRMKELAVQSGNGTYSDADRGSIQIEIEQLTDEINRIADQAQYNQMHMLSNKSASQNVRTAEELGMQPAKINTPASLSGSQASWTLRVHVGANQDEAIAVNIYAANVANLFSGEGSQAAQTAPVQEGAQQEGAQQPAPATAPSQGGVNSPVNVTTTVDANTSLAKIENAIRMISDQRANLGAFQNRLESIKDSTEYAIENLKASYAQIKDATMTDEVVASTTNSILTQSAMAMIAQANQVPQYVLSLLR

SEQ ID NO: 641 - protein, 665 aa, Borrelia garinii
MASGFFVPGLESKYNTKEIRESMLKPDRAKIDSSFKKLESLEQEKSAWQLINRKISALNSLAKEITSLNSPFNLMSGNSSNSEVLTLSTRYGSKNETHKLIVDQIASADVFLSSNFDPKKVTIPEGDYIFLVGKKEINVKSNGNIDLLVKDINNKGKGFLSAKIVKSDKNGNSRFILQSLKEGKENKLVIKGEGLSFAKQIGILSELKTNFNPTFSDIVVNQSSSNNRLVFENNSLVLNPLSEVSIEIPEDIEITSRSKIKFKVKYFDTGLEEPDSKIIFNPGEATFKDAKVDSEYSVVDLGSDLKTPLEKKYIQMNMVKICNIEGSLELPSINISNNFEEVEADVGAFSNLQEINIEITANNKVIVISNVEVFDPKNRDGHLPINAKSFAENAKIIFDGVHVERDLNVINDLIPNVTLSLKKASSDMVEAKVEPDYEGIKRVLLDFIGAYNEVIAEINIVSSNEDQLGNQKSNIVEELTYLSESQKEEAYKNLGVLRSEFLLKNLKSRLESIIFKPYVTSDPNFSIINQMGVFTNSISSSGGLSRYLRLDEKKFDESIRNNIDNVRELFLFDLNGDRVYDNGIAKMLGDCLAPLVTSGGVIYNKIKNYDLKIVNQKNKVEDYKKKYDDRERKVEGELNILDFTVKRMKDQENTLKAFDFNQRNR

SEQ ID NO: 642 - protein, 401 aa, Borrelia garinii
MPNFCLFNSKSVLTGNDKLDNSAVLIKDNEIFDIVTSDRLKKMDLREYQMIDAKCNYITPGLYDSHIHGFHGYGTDQCSTESILKMSEHLAQYGVVGFLPTLYPRPIDEMIQTIKACTAAIGKEKGAKILGLHLEGPFFSPEKRGAHPVSYLHEPSIKVMQKLIDAAGGIFTGSNGQKKTHISTMTVAPELKGMRELAMFCLENNINLQAGHTNATYENMIEGFQVGILHTTHFFNAMSKLDHRNPNAIGAVLIHGDVSCEIIADGHHIHPKLVLMMRKLKDISKIVLVTDGLTPNFQTSGKLIANGDEVYIAEDGLFHSVKSNTIAGSTLTMIQGLKNLVEFGYSLSDAVQASSYNPTRILNIDKKGLICHGYDANINVLDKDFNLKLTMIESKIIFNNL

SEQ ID NO: 643 - protein, 627 aa, Borrelia garinii
VDSTFSGIEIGKRSLFAHKDAMNTVGHNLSNATKPGYSRQRVTMKTEIPLYAPQLNRAKKQGQLGQGIVVQSIDRVKDELLNTRIVEESHRLGYWTSQDKFISMLEDVYNEPEDQSIRKRLNDFWESWQDLANQPQGLAERKIILERGKSFCELIRSRFHSLERIYIMANDEIKITTDEANNYIKNIANLNKQISKSQAMKDNPNDLMDARDLMVEKLGNLISVSIENKQDPNEFLIHSEGRHLVQGSIANEFKLEATNGPTRTKWNIFWANNDKANLETGKLGSLLNIRDEEIKNEINELNNLAANIIELVNEIHETGHGMDKKSGRSFFSQELKLTDERGRYDTNGNGQFDSVHIFKINSTNEIFPEEKLGFYGILKFEATNSNEIIEIPYNAPDTVQDLITRINNSNAQVTARINSEGKFEIKAVKEQENENITFRIKHIEDSGLFLTKYTGILNESGPEGAYDYRNIDTIDKLTPKSTYSISPLKNPAAWIKVADIIDLDPSKIAAGINSPTNEISIGDNQAALRISSFGNSQIMIGKNLTLNDYFANTASNIAIKGQISEITKESQSQILKDLTDLRMSISGVNKDEELANMIEFQQAFIAASKFITVSAELIDTIINKMGV

SEQ ID NO: 644 - protein, 246 aa, Borrelia garinii
MSSPKILTIIVLLAILAQGCKEPSIIEKQFNYTIVFSDATEYFFQIQKTPFIKNKILFINDKSLEIIKDKLKTIKKILLTHKSNNEILNNEILKEKIFNLSKIKFSLKKSIDFLLNGKSIDFQKTLLFRDKSLNNEDLEYLEKKGKEKNVNITLINEKNISYIKTFITPQIKTIILFSFRDNNIILKKISNSPFFKNIQFVLIGNTRKDLKIIKLKYVITLKESDLMEIVKDIETDFQYEFNIYKQ

SEQ ID NO: 645 - protein, 361 aa, Borrelia garinii
VKKNLMLIFGGVSFEHEISCKSAYSIYLALLDLNKYNIYPVYIDKCTGIWYLLDSVSDPPKLIDIDVLPIVSLLPGIGIFSNNKNLDIDVVFPVVHGRTGEDGAIQGVLKVMDIPCIGAGIIGSAISSNKYFCKLLLKSFNIPLVPFIGFRQYDYFLDKEEVKRNVREALGYPVIVKPAVLGSSIGINVAYSENQIEFFIEEALKYDLTILIEKFIEAREIECSIIGNEKIKIFSPGEVIVQDFIFYDYDAKYSVIPGNSIIFNIPAQLETNQLLSIKEYAFLVYKNLELRGMARVDFFVEKKSGKIYLNEINTIPGFTDISMFAKMCSHDGLQFKDLVDNLINYAFQSYINRKKRINFED

SEQ ID NO: 646 - protein, 906 aa, Borrelia garinii
MNKKRTNFSVLLLLIFLLILSFGGFGYYIYQSKLNDKNREIMLNEVKNSIIDRNYKKAYSVAKLLQDKYPKNEDIAMLTNTLAEIANSSPFESNELQRDSANQILDKIKGQENAKTNINENFDIAFNNRYIKDSAITENYADRNDDIGIEDEDISEFKKSKIPEKVNQNAKQKEEDQAIQSPNPKLNVNDQKNSFNLEKLKKKLSEKSNSENILKNPQNIENDKQSSNFSKEKNSEHILRNPDNSKYSKNDNATFLKDVPLNSKKESDFSLPSQTIIGKIHRPYSYLIKKELYEILDDINTGRVALGKNRLKKLIKKGLSNKFQKVNELIESLKNKDASNLLLTLIKKDIEPNLINVPNIPKDPYKKDIFQLNKEDKKTQQSEDLKSKIYSIKPTDLENPKNRQQAIKDLNEFLKINPNDTYASKTLAQANKIQQSENLKSKIYSIKPTDLENPKNRQQAIKDLNEFLKINPNDTYASKTLAQANKIQQSENLKSKIYSIKPTDLENPKNRQQAIKDLNEFLKINPNDTYAYKTLAQTYENNGDLLKAENVYEKIAKLTNAQEDYYKLGIIRFKLKKYEHSIGSFDQTIRLDPKHKKAHNNKGIALMMLNKNKKAVESFEKAIQIDKNYDTAYYQKGIAEEKNGDMQQAFTSFKNAYNIDKKLNYALKAGIVSNNLGNFKKSEEYLSFFNDNAKKPNEIAIYNLSIAKFENNKLEESLEIINKALNLNPEKSEYLYLKASINLKNENYQNAISLYSSVIEKNPENTSAYINLAKAYEKLGNKAQAISTLEKIINKNNKLALNNLGILYKKQKNYQKAIEIFEKAIKNSDIEAKYNLATTLIEINDNIRAKDLLKEYTKLKPNNPEALHALGIIEYNENNNDQILRELVKKFPNYKKNENIRKIIGI

SEQ ID NO: 647 - protein, 278 aa, Borrelia garinii
MKKFVILIFMLSVSLLCNCKNQDNEKIVSIGGSTTVSPILDEMILKYNKINNTKVTYDAQGSSVGINGLFNKIYKIAISSRDLTKEEIEQGAKETVFAYDALIFITSPEIKITNITEENLAKILNGKIQNWKQVGGPDAKINFINRDSSSGSYSSIKDLLLNKIFKTHEESQFRQDGIVVKSNGEVIEKTSLTPYSIGYIGLGYAKNSIEKGLNILSVNSTYPTKETINNNKYTIKRNLIIVTNNKYEDKSITQFIDFMTSSTGQDIVEEQGFLGIKT

SEQ ID NO: 648 - protein, 405 aa, Borrelia garinii
MQDPRLSKYKNTKNLSKKTVEEIDTLSLNKNFSDSEIQGSMLRSWISLIKGNKNKAPVESKSDNINNLKPGFIRKESKVIKIAKYFLAIGLEKSAKIMSELDDSDIILITREISKISYIAPEEKDHIIKEFEELIRNEKRYVKVDDNFAYELLNKTLGKSKAKLIYKKVTGNDIFIPFDYLSQIEHEQLWALVKDENIKTLVILYNYLNKDQKKYVFSMLEEEGRREFVKDLAKPRQLSMETIEAISNKLKDRFKMQGRLKTDKLDGSKILVDILSYMDSNEEKSLLNKINMRDLNPVVDSEIREKIFDINVILRIMDNDLHNILREFTDKEIAIIIKDKTDEVRDKMLSNVSKRRKEIILDEEAFLGKISKKDLKAMTSSFVNYIKSLTLKGDLVIYRKNEEFI

SEQ ID NO: 649 - protein, 668 aa, Borrelia garinii
MLIFGFIGLFFLNLFSLNAQGIVTNKDAQEEFKWALNSYNNGIYDDALLSFKKILSFDPNNLDYHFWTGNVYYRLGYVEEALMEWRNLKDQGYKVPYLRHLISTIEQRRGIFSNYELNFKKLVKVASLDNSIYKRPHGYQITSLRADKYGGYYAANFVGNEILYFDVNNNVNALVKDGFSYVKSPYDVVEANNLLYVTLYSSDEIGVYDKVLGVKKRSIGKKGTKDGELLAPQYMAIDKRNYIYVSEWGNKRVSKFGLEGDFILHFGYKTSGYNGLLGPTGITYLNENIYVADSLRNTIEVFDTSGNHLYSIFTSIEGIEGLSSDSAGNNVIISSKYGVYKYNIAKKTITKILKADKVNSKISSSILDANNQMIVSDFNNAKVSVYKSDSSLYDSLNVDVRRIVRLGGPKIYVELNVSSKSGLPVVGLKSENFSIANENYYIVNPKVVYNVNASKDINIAVVFDKSSYMKNYDLDQIVGLNALIESSKNKNFSFINATSVPIIDNIESLTSSIKNTSSLGPYSTDTVKTDVSLKLAGSGLMSKSSRRAVVYFSGGVLNHKAFEKYSLDTIVSYYKNNDIRFYLILFGNDPVNSKLEYLVNETGGAIIPFSSYEGVSKVYDLILEQKTGTYLLEYYYPGPQEPNKYFNLSVEANINQQTGRGEFAYFIN

SEQ ID NO: 650 - protein, 256 aa, Borrelia garinii
MGRLFLLYFLCSFVFLNLFAQGSSSYTDKQKELAIFYYEVGQRYINVGKIKKGKLFQAKALKFYPDLKKGVDIKLVVKELDTRIKDDNSKVVMLENVKLEEIPGIVHEKIEINDFTNAPKIGYLAERERSKNQDKIIKFQFGKFTRALISQKFDLFDSVVADKVDVMGQFESKGDFISALSRASSKVDADELEYLSVDDYYDLKSLKISKSNDTAFAVNVNTKKNDVTKNFPFWKEHQTLIFTKEDDNNWFLSSIK

SEQ ID NO: 651 - protein, 442 aa, Borrelia garinii
MMRSLYSGVSGLQNHQTRMDVVGNNIANVNTIGFKKGRVNFQDMISQSISGASRPTDSRGGTNPKQVGLGMNVATIDTIHTQGAFQSTQKASDLGVSGNGFFILKEGKNLFYTRAGAFDVDSDRHLVNPANGMRIQGWMARDLEGEKVIHTASDIEDLIIPIGDKEGAKSTKNITFACNLDKRLPIIEEGASSADIARGTWVVNKSLYDSFGNVSVLELTVVKDLNTPNLWNAPVLINGEQNSNFTIGFDNEGALASLNGQPGQKEDILQIPITFNVVGANVGEVGEQQTVNLKLGTVGSYTDSITQFADSSSTKAIIQDGYGMGYMENYEIDQNGVIVGIYSNGIRRDLGKIALASFMNPGGLAKSGDTNFVETSNSGQVRIGETGLAGLGDIRSGVLEMANVDLAEQFTDMIVTQRGFQANAKTITTSDQLLQELVRLKN

SEQ ID NO: 652 - protein, 448 aa, Borrelia garinii
MNKLEEHYIVPKDVVLELDKYIIGQDEAKKLVSIALVNRYIRSRLPKEIKDEVMPKNIIMIGSTGIGKTEIARRLSKLIKAPFIKVEATKYTEVGYVGRDVESMVRDLMSIAVNMVKEEMYNTVRDDALVKTEERIVESLFKGSGNSENVDPNEIKAEEKVKEKLRKKLRAGELDNTTIEIQISSKMPFSTIEIFTGGNFEEIDMGIGGLLGNIFDRKKKRELKIKKAKEIILAEELEKLVDHENISDIAKSKVENMGIIFIDEIDKIAAKNRSGNDVSREGVQRDILPIMKGSKVNTKYGIVDTSHILFIAAGAFNLAKPSDLIPELQGRFPIKVELKSLSIDDLKKILKQTKNSLIKQYVAMFKVYNLDLKFSEEAIDRIAELTFNMNLENENLGARRLHGVMERVLADLFFEVPGSKLKKFEINLDYVNKKIQINEQKDLNYYII

SEQ ID NO: 653 - protein, 227 aa, Borrelia garinii
MRKTIIIALFYGLITNIYPEIKSTSKLNEQANKYKIEKLYQKSMLLKNSKKYNKAIANLKKIVNMDQNQVDAHLLLSELEYLNKNWKKAIVKSQDYLKIIDFKDKKNFLDISWAYFLIGEVENSMDYIIKFFQSGKELFKENIFIAIDALFKKSIYHFINNENEAFNTILTSTFQLALNDDTLFIIFLNNLEIIKQIPFYYFNRKKLKELYLQISALKTIQNTMCKT

SEQ ID NO: 654 - protein, 376 aa, Borrelia garinii
MNIKNKLILMLCIVVAVSFIACKTPPEARESKNAKIAKPDTKSFELRDIKDIKNEVIKERGHLFYSKEFNEAEKLEEVMKQNFSKKKAKEVNEIALKVLERYKPIIKEPREKKEKVNYLKENIEKYLNDAEANEAYIWIPLEIDEVNNLYFEATRKYKNYDLDDALDMYSKAFNRAQQAAKNAKEAKALKETDERMYKQLKALEAASNLPIYSNNKLIKPSPWNGRAFIKERNSHLNLLNINEDTYLLGETETPIVLAYAEKLEIAKNSKPQEQFKTLELIERSRKLWEKGVEAKNVKNFRLANELFLESARYLEAYQSNASSELYVIKIGNTLWGISKKLYNDPYLWPKNWFGYRQKIQNPDLIHSNWKIIIPAK

SEQ ID NO: 655 - protein, 527 aa, Borrelia garinii
MKLQKLLFSVIFFLTFLCCNKEEKKEGISFKISLGSEPSSLDPQLADDNVGSKMIDTMFRGLITGDPNTGGNKPGLAKSWDISPDGTVYTFTLREKIIWSDGVAITAEGIRKSYLRILNKETGSNYAEMVKSTIKNGQKYFDGQVSDSELGIRAIDEKTLEITLESPKPYFIDMLVHQSFIPIPIHIAEKYGQSWTSPENIVTSGPFKLKERIPNEKYVVEKNDKYYNSNQVEVQEITFYTTNDSSTAYKMYENKELDAIFGSIPPDLIKDLKLRSDYYSSAVNAIYFYAFNTHIKPLDNVKVRKALTLAIDRETLTYKVLDNGTTPTRRIAPNFSSYSYAKNLELFNPEIAKTLLAEAGYPNGNGFPILKLKYNTSEAHKKICEFIQNQWKKILNIDVELENEEWTTYLNTRSNGNYEIARAGWIGDYADPLTFLSIFTQGYTQFSSHNYSSPEYNELIKKSDLELDPIKRQDILRKAEEIIIEKDFPIAPIYIYGNSYLFRNDKWTGRNTNITERFDLSQLKLKK

SEQ ID NO: 656 - protein, 541 aa, Borrelia garinii
MNFNKAKKIGRKIKIAALIMLAISLITCNNNSEKEKLTFKVYIGGAPSSLDPHLVDETIGARILEQVFSGLLALNTKTGKLMPGLAKNWEASKDKKTYQFYLRDNLFWSDGVSITAEGIKKSFLRILNKETESTHVDMLKSIIKNGQEYFDGKVSDSELGFKAIDSKTLEITLTSPKTYFLELLLHHTFMPVPIHVIEKYKENWTNPENMVTSGPFKLKKRLPNEKIIFEKNEHYYNAKEVELEELVYITSDNDMTVYNMYKNNEIDAIFNSIPPDIVNEIKLQNDYYQHKSNAIYLYSFNTKIKPLDDAKVREALTLAIDRETLTYKVLNDGTVPTREITPDLENYNYGKKLALFDPEKSKKLLTEAGYPNGKGFPTLTLKYNTNETHKKVATFIQNQWKKILNINIMLTNENWPVLTNSRNTGNFEIIRIGRIGEYLDPHTYFTIFTSKNSQLASYKYANLEFDKLIKESDFEQDPIKRKNLLRKAESIIIEKDFPAAPIYIYSGHYLFRNDKWTGWSPNVSEIYYFFELKSIKNAKRN

SEQ ID NO: 657 - protein, 399 aa, Borrelia garinii
MEENDFIKFGSYLRKVRNGKNLTLEMVAEDIKISIKYLKALEDSNIEIFPNEVLAVGFLRTYSEYLDIDSRLISTLFKDYKSKLNNSYIGIRSEDKISNLGFLSDNKVLDKKLFFLNLESLSILKILLGIVGVILLLFVFFAFREVEVYFKKFFKLSQNEKIISNLHEVSFDKKNFWNISLKEGDSLFLTYGDNIAKYRASFISDDLVIVDESKKSKNIFNLGEFKEINLDDNIRVKIIYENYYYDKSKIANVSLESFALNVKYVSETNIDNRFNILNWQFDVKGTEKLPSGDYLTLYSSQKLSNVDLKIDFLNDTFFRYADENNLHGKSFFASKGIPINLAFEKSLILFFSRLSDVNIILNERDITPFLKEQGKEIFAVQFFWVKTPSGFDLKVSEVY

SEQ ID NO: 658 - protein, 472 aa, Borrelia garinii
MSLNYVEINTLIKEIPFANSLIKEIIQPDYKSLILEIYNKIDNKKFKILISLNPSTTRFHITRKNFKKNALKLRFSDFLKSKIQNGKILKASQMKNERIIYLEIFKKDIIILFIKLWPSSPNIIATNQNFKILDAYYRRPKAKETTGETFLKAKEIHESNKMPDKKIMGLKEEYDNTSHKSYSEFLENYYESLSNQIKKNNIKELLIEKYKKELIALEKRIGSLKQQIKLIKNIENEKEKGELILLNINKIQKGIKEIALLNYKEEKIKISLNQSLSPKENALQYFKAYKKGKNSFETIQNQLKDNLDKFNLIKSKINMLKIKNFIPKEEYNQEETAIKKKEKTPKIGLHFTSCGFEILIGRNAKENDELLRRCVKGNDYWLHTRDYPGAYVFIRNQKNKTPCLDVLLAAGNLCVFYTKLAKKSGKADLYYTQVKNLRRVKNGKLGLVIPKAEKNLHIKLDEDLIKKIKNKT

SEQ ID NO: 659 - protein, 599 aa, Borrelia garinii
MKREIYAFLSNFIIFLCFFLGLIFSYSYFFGENFLEKHRLIAAFFDSILLFYKYFYGFFIFIVCIYFAFFVQQEIKIYLKSYNGYLFSRLYAFLLLFFIIGLFFTFIFNLILPYIIAQRNEYKFSYDRYNLLESEANEISLKIKNIDISLSSNRLFLSTDLSDSMKQKRKHLENLIRIYDKMRIIYVNNEELLTNYYLVKSEYNKIPSYDVDLEKVKKTFSRYPLRSLKKQDFFNIVNEFISQNDYHTANYFAYIAYVATKDDNFVALLNLTLKFINENRNFEKEKMQLISEEKQKNFLYLNTEKFKLAYYGFSNLHKLLPSDNEILNYKNKSLEKLRKKYLFFDEIEKYFEYYGINDVFLLQPDSNKRFYDYIYMQKVVTLNNYSKIIKNFELIRFNKAGNVILHIKIPFATLRGNFVYQNVLNKDDEQSEITLTKVFVSVDSFDTNVLEVVKINENVENLALFSNFSEVGFFLKIQSLSSAFNKVAILNLKLINIFSLSLILLISPILLVLMGAFFISLFSKIEFNFNSKAMIFLVSLMIAIFSGIICLFVNYFLIVFTSLLIYTFNSVHISLAILSSLLFFLIFKVIVGNYKEKHI

SEQ ID NO: 660 - protein, 476 aa, Borrelia garinii
MKNKFLICAYFLLTLSISSLVIVESIFAVDESNNNKLSRSSYEQMMIQAFEFVKENYVEPVNDEVIFEGALKGIFQALGDPYSQYLTKKDLEEISKTTVGDYVGIGISIIKKMHSQDKQDKAKNLDSNSFCVSIVTPFEGGPAYKAGIKSGDCIIAVDGKSVSSMEVDQVVDRLKGKEGTKVKVSILRGKDLTLDFELTREKIEIQTIKYDVINPDIGYIRIVSFNPYTSVDFSKALDNLKNRNIKSLILDLRLNTGGYFQAAIKMADDILSKGTIVSTKSRNSSKPIDYKASSKQVLPSDIKIVALIDRSSASASEVFVGALKDNKRAYIIGEKSYGKGVIQHVVPFYTGGFKITSSKYYTPSGKSIHKVGIEPDLEIKSPDFSEEEAVIYKEIFDKKLIEGFLKGKKSITEQEIDFFVENLVKENPKYKIDKEFLGKYVFFNYYQDNNKELPIYNLHYDKVLKAACEYLSKLGN

SEQ ID NO: 661 - protein, 458 aa, Borrelia garinii
MKKQNPWISLSEEEKNQIFNFSESYKKFISKFKTEREVTSYALDKAKKRGFIDAEEKKNLIPGDKIFYTCREKSVAFAIIGKNPIENGMNLIVSHTDSPRLDAKPSPISEENELAFLKTNYYGGIKKYQWLSTPLSIRGVVFLKNGEKVEINIGDNENDPVFVIPDILPHLDKKIQRNKKSDEIIEGENLKILIGSLPIESKEQDKVKLGTLQLIKEKYKIEEEDFVSSEIEIVPAGTAKDVGFDKALIGAYGQDDKICAYASLEAIFDLEEIPSKTAICFLVDKEEIGSTGSTGLDSRYLEYFVSDMIFKIKKSEYNNLQVQKALWNSKSISADVCAAINPIFNSVHDAQNAPKLGYGIPIMKYTGHGGKVMASDADAELVSYIRQLLNKNNIAWQVATLGKVEEGGGGTVAKFLASYGIRTIDMGPAVISMHSPMEITSKFDLYNAYLAYKAFYKE

SEQ ID NO: 662 - protein, 341 aa, Borrelia garinii
MRIVIFILGILLTSCFAGNEIESGSSKIKISMLVDGVLDDKSFNSSANRALLRLEEDFPENIEKVFSSAASGVYSSYVSDLDNLKMNGSDLIWLVGYMLTDASLSVSLENPKISYGIIDPVYSDDVQIPKNLIGVVFRIEQGAFLAGYIAAKKSVSGKIGFIGGVKGDIVDAFRYGYEAGAKYADKGIEIVSEYSNSFSDVNIGRAIANKMYAKGIDIIHFAAGLAGIGVIEAAKELGDGYYVIGADQDQSHLAPRNFITSVIKNVGDALYLVTSEYLKNNNTWEGGKIIQMGLRDGVVGLSNANKFEYIKVIERKIVNEEIIVPYNHEGYEIFIKQILKL

SEQ ID NO: 663 - protein, 1377 aa, Borrelia garinii
MKEIKDFEKIKIKIASPDQIRNWSYGEVKKSETINYRTLRPEKDGLFCERIFGTTKEWECYCGKFKSIRYKGIICDRCNVEVTHFKVRRERMGHIELAAPVAHIWYYKYIPSRIGLLLDITASSLNSILYYEKYVVIEPGDTDLKKMQLLNEDEYIEARERYGMSFNASMGAEAIKTLLENLDLDELSSKLRIQMIDKDDKTDKKLLRRLEIIENFKVSGNKPEWMIMEVLPVIPPEIRPMVQLDGGRFATSDLNDLYRRVINRNNRLRKLLLLNAPEIIVRNEKRMLQESVDSLFDNSHKRKVVKGSSSRPLKSLSDALKGKQGRFRQNLLGKRVDYSGRSVIVVGPELKLHQCGLPAKMALELFKPFVIRRLIESEAVFNIKRAKNLIEQEVDEVWQILDFVIKEHPILLNRAPTLHRLGIQAFEPVLVEGKAIKLHPLVCHAYNADFDGDQMAVHVPLTPSAQAESWALMLSTNNLLNPANGHPIVFPSQDIVLGLYYLTMEKKNIVGEGKKFLNFSNVILAINNRSLDYNASIYVKIDGEYKKTTAGRVIFNEALPKGIEFVNKTLSDLELQILISKVYVVHGSSTVIEMLDIIKELGFKYATKFGCTISMSDIIVPDEKKTYIDRANKEIAKIQNDYAKGVITGEERYNNVVSVWLKTNEELTNKMMEILKKDRDGFNVIYMMADSGARGSRNQIRQLAGMRGLMAKTSGDIIELPIISNFKEGLSVIEFFISTNGARKGLADTALKTADAGYLTRRLVDIAQDVVVRIEDCGTINGIKVETVKNGEEILESLKEKAVGSYSIERIKNPITGEIVLDANEEISEAKIELLEKIGIEKLVIRSVLTCEAEHGVCQKCYGRDFSKNKPVNIGEAVGIIAAQSIGQPGTQLTMRTFHIGGVAQAGSEDDKISLKNAFILNSIEGFNVNVDNGILFTRKGTLKIINVFYEEKIKNIKEIKVLDSQRVIKGIPLFVNKKGVEILSSYIGYAKLRDDKFLIVSEEQEVALKAGTKLEIGVGDYVESGKVIGTFDPFAEPIIAEVKGKIKFKDIILGTTLKEEINTETGNVEKRITDNVFESLDPRIFIIDSSGMEVASYVLPGDAYLQVEDGQNINIGDVIAKLSKGSEKTQDITGGLPRVNDLFETRIPKNLTEMAKVSGIVQFKSIQKGKRLINILDEYGVEHKHYIPAGKHLLVRDGDVVKAGDMLCDGRINPHDVLEILGGISLQEFLLAEIQDVYRKQGVSINDKHIGVIIKQMMKKVKIVAVGDTNFVYGQKVDKHTFYEQNRKVIEQGGEPAIASPILIGVTKTSLNIDSFISAASFQETTKVLTDASIAGKIDDLRGLKENVVIGHLIPTGTGMGLYKKIKVSENIDAKV

SEQ ID NO: 664 - protein, 1155 aa, Borrelia garinii
MIKRVHLGQGRADEILDLPNLIEIQLNSYEKFLQLDKLKNKKPLLNEGLESVFRNIFPIKSGNGDVALEYERYYIENDALNFTEKECKRKGQSYEAVLKVRLNLQFLTTGEIRQKDVYMGTIPLMTERGTFIINGAERVVVSQIHRSPGVVFYKEKDLYSARIIPYRGSWLEFEIDSKKDYLYVKIDRKKRILITLFLRALGFDTREKIIETFYNIKKIKVEDSTKRDLPGQYLAKSINIRENMYYRAGDKITLQDVEDFLQNGVNEIELVDFDGYDAISGKCFVSSNVILNCLEKEDAFFALKDGSKELPKESVMLAVYGALFPGEPISIDNAENDLKTIFFSERRYDLGRVGRYKLSKKFGFDDLSTSVLTMYDIVNTISHLLRIYEGHDILDDIDHLGNRRVRSVGELLTNIYKGAMSRVEKIAKDRMSNKEVFNLKPQELISVKPIVSAVKEFFATSQLSQFMDQVNPLAELTHKRRLNALGPGGLSRDRAGFEVRDVHYTHYGRMCPIETPEGPNIGLIVSLATYSRVNDYGFLETPYRKVVNGEVTDELEYLSAIDEEKKCIAQANAAFNSNGKYLEDLVSVRISGDYTTTNPKNIDYMDVSPRQLISVSSALIPFLEHNDANRALMGSNMQRQAVPLLFPKPPIVGTGMESVVAKDSGVVVKAKRSGEVILATSSKIVVKPFESENAKDLDEYHIVKYERTNQDTCFNQSVLVKEGQKVESGEIIADGPATRYGELALGNNLLLGVIPWNGFNYEDAILISDRIVKEDLYTSIHIKEFSIEVRETKLGPEKVTGDIPNVSEKILNKLDENGIIRIGTYVKPGDILVGKVTPKSEGDITPEFRLLTSIFGEKAKDVKNNSLKVPHGTEGTVIDVQRITKEDVGNLSPGVEEILKVYVAKKRKLKEGDKMAGRHGNKGVVAKILPVEDMPYLADGTPLDICLNPLGVPSRMNIGQLMESQLGLAGKYLGESYNVPVFESATNEQIQEKLKKAGFNPTSKEILYDGYTGEPFENEVMVGVIYMLKLHHLVDDKMHARSTGPYSLVSQQPLGGKAQFGGQRLGEMEVWALEAYGAAHTLQELLTVKSDDMSGRVKIYENIVKGVPTNVSGIPESFNVLMQELRGLGLDLSIYDDNGNQVPLTEKEEELINKG

SEQ ID NO: 665 - protein, 347 aa, Borrelia garinii
MEKVFKIKKICFCLLLLLQAKIVLAQNQHDLKFNNEYFYFNFQSAYYPPHELGTSGSNFSQSFKHPNFQNIEPSLKIPANYWGGIKLISYLGYYKNFKALHNPNSIFFKNNGIEVDLNIGLSPVSISLKSMLSFTPIAFLNLYVSNEIGMGWKAFGFKGIGVHIENGKYSNDIEFYSEITIGGRFQFDLNAIFKGEWTHIITVIGNDFTYLINPHANKDQLWKYKADDGKNINGMLIKPYALLAYKMPIPLNTIGLLYEGKTQIGKERNISSWKNKGWGSDIFYHNISLIANFEVVKPLTIGLQLKLSTNPTYTSNTAGLADVSKRIATGNSYFYYDSIGISVTYKY

SEQ ID NO: 666 - protein, 1496 aa, Borrelia garinii
MKKANFLSINFLILLLVCFFNVNLFSKDIFKFKLVGQYFPFYYKNGKGKYEGLIFPILDKWAKDNNFDIRVETIDNLNESKIEDDSIYLGLTYRSKLNDLFYFKSEFSRSIAILFSKSSNKKYKNAHSPWLSNFNIGVVKNPIYEEFLKLRRANTIFLVDNAEELLLALKNDKVDYIYGDCKTLAYIAKRFLGEDLAIFNGDIFYSIKNRVAISRNAPEIIKNLNLDLFSYLMEIPDEHVFSFLDSTSKGNFIDIGLYNDYPPLSFINSKGKLSGILVDLWNLLSRQHIFKPIFKGFPKEDIKKSLDGKSVGIFGGIISNDSVFKNVNYVVSKPIYPLNFKFYSKGLSNNVGPINSQFIDFDFNNIQLNKNQDIVNNFIDIVNNSYGFIENSITTKYLLKLNGYNGRLKSYDSIFNKNRFLVLAIDNRIYKVIKYILNSIFDDISFESLLQIDKNWLDKEEINSSRINSYKIMNKLKFNIEEKIWLLKNNKLNLAVKNWYPIDYVEANNYKGINQFLLDKIRMFSGLEFNIIETHSILDLKKLIKSGKIDMLNTNAIDSNLDNVFNIKLNSRIPLYIFSNKKRVLPSRSLERFAVLDFLYNKNLTSNIKSKLILVSSFKEALLLLYKGKIDGIISDEYTAAAVFEELNVADVEKLPTFRDLAFDLSLAIYNQDYILKEIIQKVVIRSNVDSQKYLNDWKFDIYYKSKGIRFKNFKFLVLTVIIFYFTFLGFVIILMFKLSFEQKRKYFSVMNEKKIAESANTAKTIFIANISHDIRTPINGIMAATELLDTTILTDVQKDYVRMINYSSDSLLSLIDDILYLSQIDVNELYVDSQEIDLESEMEMVLKIFQSQCAKKNIDLFSYSKSIFKNYIKGDIVKIKQVLINLIGNAFKFTDDGVIVLNYEEVCRTRVDDNRVLVTVEFKVIDTGKGIKRENLSKIFEIFKQEDDSSSRVHEGAGLGLSISRELIRLMGGLGIAVDSKVGEGATFSFMLPFYLGDELKSESLSINTFQLINSNNKVKVLNVLLSQKSIKIFEHCSTLLGESSNVDYVASFEDAYKSFKEAPFYNFVFVNVNNDNIKESIRFANNIERLSPDVQIIFLFYYLDNKALKNLKYMYVKKPLMGLGISSILSKKEFKIETDFEDLVPIDSAFKIKGPINVLIAEDNQVNQKVLKDILVVIGINENLIDVVDDGLKALKSLKEKQYNISFIDIRMPRYDGFSVAREIRKFEKAKNLKPCVLVAVTAHALQEYKDQCFESGMNDYISKPIHISSIKIILKKYLQFEVDDTWENKDLNQPVNFPHLDINRALKELNLSYALYSELCRGLVDFISINIIDLEKAFDEENLPLIRDISHSISGALSNMRSELYKDFKKIETSKDSIYELKKMYSFVKDDLLRLINNIKENVLLESEVISENKLYFKNNDQFLTLLNKLLIGIKTRKPKEYKEILESIEKYVLDDNIQILFSDLRRNLRLYRFAESSKILKEIIEMFSNKRY

SEQ ID NO: 667 - protein, 260 aa, Borrelia garinii; identical to SEQ ID NO: 426

SEQ ID NO: 668 - protein, 634 aa, Borrelia garinii
MNYVASNIQVLKGLEAVRKRPGMYIGSVSVNGLHHLVYEVVDNSIDEALAGFCDRIDVVINLDNTITVIDNGRGIPTDIHEEEGISALELVLTKLHSGGKFNKGTYKVSGGLHGVGISVVNALSSFLEVYVNRDGKIFRQTFSKGIPTSKVEVVGESSVTGTKVTFLADSEIFETLDYNFDVLEKRLKELAFLNDKIYITIEDKRAGKEKSSKFYFEGGIKSFVDYLTNDSKAFQSESYYIDGFINDVIVNVGLKWTESYSDNILSFVNNINTREGGTHVMGFRSGLTKAMNEAFKNSKISKKDIPNLTGDDFKEGLTAVISVKVPEPQFEGQTKSKLGNSEIKKIVEIIVYEHLLEIISSNPLEIDIILEKAIRAARAREAARKARESERKKNAFESLALPGKLADCASKNPSEREIYIVEGDSAGGSAKMGRNRFFQAILPLWGKMLNVEKTREDKVITNDKLIPIIASLGAGVGKTFDITKLRYHKVIIMADADVDGSHIRTLLLAFFFRYMRDLIENGYIYIAMPPLYKIKYDNRIYYFYDEKEKEKFLDSIETKNRNNIFLQRYKGLGEMNPTQLWETTMDPARRKMRLINIDDAIEAEKIFVTLMGDLVEPRKEFIEQNALNVINLDV

SEQ ID NO: 669 - protein, 586 aa, Borrelia garinii
MFKVIKCNELNEKLINKKVEINAWVKKIRHHGKFIFLNIRDRYEKAQVLITEEHLLKIAEKIKLEYCIKIQGLLSKRPPNMINENMKTGSFEILAKNIEIISKCNELPFMIEDDNNASENSKLKYRYLDLRRDSLKNKIILRCQATHLIRNFLVKKKFLELETPTFVKSTPEGARDFVIPSRIHKGSFYALPQSPQLYKQLIMIAGFDKYFQIARCYRDEDSRGDRQPEFTQLDLEMSFVKKENIFKLIENMLFLIFKNCLNIKLPKKFKKITYKTAMNKYGSDKPDTRFELTLQDISRNLKNSEFNVFKETLKNKGSIKILIVKDEADKFSRAKINNLEEIAKLYKTQGLYFAKIENNKFSGGIAKFLKTEEQQLIKTYSLENNDIIFFTANKKWETACKAMGQIRIKIANDLGLIDENKFEFLWVYDFPLFEYDENTKTYTPAHHMFSLPKKRYIASLEKIPNKTIGEIYDLVLNGVELGSGSIRIHNKELQQRIFNIIGFQKEKSEDRFGFFLKALEYGAPNHGGIAIGIDRLIMLMTKSTSIKDVILFPKNSFATSPLDDSPSKISNEQLKELGINIVTDDA

SEQ ID NO: 670 - protein, 229 aa, Borrelia garinii
MKTIDHEFYYEFRVADDVRMIYTKKPFHLNLRELNNDNLNFVPKSKKIKYLKQLHTDIIYRAEDDFINFQEGDGLISSSLDVALVAYFADCLPIYFYDSAKKIVGLIHSGYKGSFSLIILKMLFMFEKMGSTFKDLKIVFGPYNRSCCYEVSEIFLKEVGNKFSKGLLNTVFDIRDGKIYFDNASFNLNLLSSFNLNIYNSKLCTHCLKNLYSYRRLREGQSYALIWRI

SEQ ID NO: 671 - protein, 427 aa, Borrelia garinii
MYSYIVEGGFKIGGQITASGNKNSALPCILAALLTNEDVILENIPNINDVKVVLDILSDIGADIVREGNALKIKVSNIVKTEIDSSFTDLIRASILLLGPFVSRFGEIDMALPGGDVIGKRRLDTHFYGLSKLGAKLINKDGRIVLKAKKLVGAEMFLDEASVTATENIIMASVLAEGNTVIMNAACEPHVQDLCNMLNSMGANILGIGSNVLEIKGVKKLRGTTFRIGADFMQVGSLISLAALTGGELEIKKADPQHFRLIRHIYSRLGINFEYDKENVYVRDKQELKVKLDFGGHIPKIDDGPWPAFPTDLMSIIIVTATQVEGTVLVFEKMFESRMFFVDKLIKMGAQIVLCDPHRVVVTGKSPLKGNVLSSPDVRAGMSLLIAAFVAEGRSEIQNVYQIERGYEDVANKLINLGAKIKKVKSQ

SEQ ID NO: 672 - protein, 209 aa, Borrelia garinii
MERKVFSKDGKEIGTINLDDRVFNIEISHGSIYNAIKNELSNLRVGTSSTKTRSEVRGSSKKPWKQKGTGRARVGTKRNPIWIGGGIALGPKPRDYSYRLPKKVKRLAFKSVLSLRAADENNFKVVENFNIESGKTKDLALIIKNFASFNGKVVILLGNDDQMIKRAGKNIRDLKILSFNKLRVVDLFYAKNLIALESAVNKLNEFYVK

SEQ ID NO: 673 - protein, 2162 aa, Borrelia garinii
MIDFATILVNLFLVSIVLFIYRQYDKRSRALDKIKKFIDLVKVNLEDFIEDKTKEINDLAVDMEAYQRSSIEIIKKIDEVQPKIKNKSNDFAEVEKKIAYHDSMLKDLDEMTLKVQENIQRLQVDGKIVDKLSKTLKGFNTQIDSVESNLNSVLEKFEKSNKENLESIKIASWEKFDINIKDLVFKMDNLNREIDLYEKDLANIEERKKDILDKGNEKLDLEFNDFLEKVEFNIGKYNKEIESSFIFYENKYKLIEDSIELIMESVKNKINEKEDFILNRLNEELENKFKDIFTYVDDRSREIQDKLEDKLILVDNEISSMSSSFKDNVYSRINSLEESIRIEMGKYEEQVDDVFDKFRSQVELNLKNIYEDYEDKISQVDKNIRERVELSLLDLNSKMESVQTGAISLIKRLEDDSNRIYLEFKNKFESDIEIFSESFKDDINQLKRQLESQLLDVDSNMQEKLIKLNDNLISNFQEIDGRFNNNYSNLTDNINSKYITLFESLDSSSSKFEDQMESKYKGFKDKLTAEMDEFSLVYSEKFDTLSQEAINNYQEFQDLNKKLENEIESLCNMFEENQEILKRDFNTNLINIKDEIDKNIVEFKDRYSDEVNNFVSKLEESKLQYSKWQGDMDSNLKNIESQINKTNEEFLSLIQIQKDKGIELSENVFNDLSDHIQKKAIDIHGSWKDELIALNKSLLDIKISSEELLSSATLKIENLERDVNDRIEYVLLKTGDIESLVIEKYKELKDMSYSQSDEAILGIKEFINRQTEIIKDKSVFMLEDLNKKFDDKNNFVISKIEECDYKLKDFKSESEDILNNFKSDLNEFIESKLQIVSNIKSDNQKQIDDFLDRISKDILNRKDSINNEVDSKLNDWQSKLNEITVKIENLLSSGKVDLDLIDSEVTTKIKELKFSIESLESYYLEKIDEFRNQGAIYSDELLQDIMNHFNKETRELEENLSKKFAVVLNNSEEFVKEVDSLLQDKRTDIASFQANIDITLDSLSVKFNDINKEINGKYNEVISNYRGYSENISSKLENEIMHEIENINRRLTDRIDNLSKGMDENLQKLKESFDVSKYQVEKFELKVKDLTDSGEAKISEFIKEIEQYYKSRLEEAIDYRRTIDSDIMQAKERFGEITNDLKNNIESKSEFLNDLYKERFKLIESNFEERYSTFLIESEGAISKIRDEIYKTLTINDENLQIKISEMDHNFEIIEQRSKDILEFEKELRDKIQDCYGIINSQFGEIKGSVEENIKNHFEVCIKKVNTLIDDDIVKYENEIHKRIDSLKSIENTFDSIEKNLNDKVNGCIDKISNDFNLKYIELEERCNEGQLNLESKIDNKIKAIDNLALSQYDGLEKKYADMYDEFLERLNSHIATLSEEFKHSNKEMIFELESQLKNLKNLESDLNNVEKDVIRLKEESYHNVSSHLKLLEEDFFKDLKIRGEELKYSLENFIASHNDKIQNLEYDLSKNLENKTELIQSFRLDIEQKMKNDKETFYLDFTKEFSSKKKDMESEIALMETNITERIDEFIDFVNNRQNIIDSWFLNIKDDVKNWQEKSYSAIEKKISLAELEIKSFENDILNVKIGLESFKDSFEIKAEEIFGNLQSEAKKFEQSVNLDFKNIGESLNLKVLDLEKFVDFKVEKIDERVNKKTEDILIQAEVKFLTQQKSLEDRIFELNQKLENEFTTLSSNLDKVRREMIDVISSDKKSFEGQIELMHKNISEFSEKIGLYRNNIETSIENEYNAFSKSIKSEFGLLEDELKKNLKHSTLEIETVKNDLQEQIDKFEVEFKKNHKKLLKEVDTNILELESKILNCDTEFNKFISESKDNLVEYKSDLRKEFEDSYDKINFQIENFKKLDAELEKNNSIFLEAYSLKEKLEKLWETLKNEINLAQEYKNNFENVNKEFYNIQKETLGIIETFNELKLEQESIKAIKNDFNRFFEFYSSFDSRYKSLIESYDEMQIYKAKIKEIADEQRNILDNYERISNKEGILKSTIESVDKNFDLINEMEKRFNNLSKESANFQNNLKDMENVVSNLLLNKGLSEEVLINAQNLKEMLLDIENRLKNTLTMREKVVKSETRLENLNIAAEERIKTLGILVKTDSKYQDNVGLNNETVRNSVIKLMRQGWSAEEISRATKLSIGEVELILELGISNKGD

SEQ ID NO: 674 - protein, 635 aa, Borrelia garinii
MGKIIGIDLGTTNSCVAIMEHGKPVVIQNSEGGRTTPSIVAYTNKGERLVGQVAKNQMVTNPENTIYSIKRFMGRRFEEVASEIKMVPYKIEKGLNGDARVNISNIKKQMSPPEISAATLTKMKETAEAYLGEKVTEAVITVPAYFNDAQRQATKDAGKIAGLEVKRIVNEPTAAALAYGIEKKHEEIVAVYDLGGGTFDISILELGDGVFEVKSTNGDTHLGGDNFDDEIIKHLISEFKKESAIDLSNDKMALQRLKEAAEKAKIELSGAQEASINLPFITADANGPKHLQYTLTRAKFEQMVDHLVQKTKEPCLKAIKDAGLKASDINEVILVGGSTRIPAIQKIVKDIFGQDPNKGVNPDEAVAIGAAIQGGILTGETKDMVLLDVTPLSLGIETLGGVMTKLIERNTTIPTKKSQVFSTAADNQTSVDIKVLQGEREMAAQNRILGNFILDGIPAAPRGVPQIEVSFDIDANGIVHVSAKDMGTGKEQKIRIESSSGLSESEIDRMVKDAEAHAEEDKKLKENIEAKNTANSLIYQTEKSLKEYSEKISSEDKEAIENKIKELKESLDKEDISLIKSRTEELQKASYKIAEMMYKDSSQQNASNQQENGTQSNTSEEGKEADYEVVDEDKK

SEQ ID NO: 675 - protein, 187 aa, Borrelia garinii
MEKKETKNDAEKNNKQDNKSTKSQKKENLNLVNSDKKITELENEISNLKDLYLRKQAEFENFRKRLEKEKDNFVKFANETIMKDVVNFLDNLERAINSSRKSKDFDNLLTGISMIENEILSIFDKKYNLKKFGENGENFDPSRHEAISIEEKEDLKNPEIVEVYQKGYCYNDRILRTAKVKVAQSKN

SEQ ID NO: 676 - protein, 227 aa, Borrelia garinii
MKDLNENNDNNKGFFVALTSIATVCIIIFLGTIIFFPNKNLASDIAEKNIVLEEAKDQNILENIDENEKSLKVSETPNEIIIDLTQDLNKEKKLTSKTPNTSQKSKPIEKSQPVAKKIPNTSQKSKPIEKSQPIAKKALDIDSVYDPNTEYYIQFVSLSDPINADNYIQKLLKYNIVAKIYSATVDNKDIYRVRSGPYKTKSEAKADFKKITGISEFKETYILPVNK

SEQ ID NO: 677 - protein, 495 aa, Borrelia garinii
MNKTKNQSFKYFIMLLCISLFGANNTINYSSIEIPLEDLSEEFKDTGNKNDQINTSKHLNKKIVSYKDPKKGKELKLPENIRDEKLLKKRMDENDLKSIIENYENKIKNIEKLLKAKNQKASSNENKKIESIEKKAKKYEILTNKLKNEITEIKKLLNKRSKPKEDENYEKINIENIDDDDDDFEENYEYNDEIEEINEDKYPSNEGIINSLKENLHANEKYYAINEKKIDELEDRINDNENTILDLQRELRNFKKKDNSDKNLEEIEENLSSIGRIINDLKEKISANEAINKENQKKIRTDKHKLKELEDKIKENEETILKLQKELNNFKKKEISQKSSNEETFIPSITNKNDELEESNKLEKKYFKPIEKNESEDLEEKAKNTKKTTMIKTANFQVYPDIYINNYKFKEKGDQFAFKKENTYYIEIDPTNNLNEALKNHEIISKYKFEKYFINPTLKNKEEFFRNLIEVKNIHELGIMYKSLKPKFKQIKIIK

SEQ ID NO: 678 - protein, 616 aa, Borrelia garinii
MKKQFDTEVNDLLYLIIHSLYSHKEIFLRELISNASDAIDKLKFLSLTNEKFKNIALEPKIEITFDDKSILIKDNGIGMNEQDLTNHLGVIAKSGTKEFINNLKQDEKKSASLIGQFGVGFYSAFIVSEKVEVTSKKALESDAYIWFSDGKTGYEIEKAKKEESGTEIKLYLNKEGLEYANKWKIQEIIKKYSNHINYPIYIKYSEPIMKDGKQEGIEEKEEKLNETTALWTKNKSEIKAEEYNEFYKNTTFDYENPLMHVHTKAEGNLEYTNLFYIPSKAPYDLYYPNTKPGVKLFINRIFITDSEGSLLPNYLRFIKGIIDCQDLPLNVSREILQQNKILSKIKSSSVKKILSELEKLSKKNPEKFSKFSKEFGRCIKEGVYSDFENREKLISLIRFKSSSVDGFVSFKEYKERMKESQKSIYYITGGKENILKENPIVSAYKEKGFEILIMDDELDEAILNLIPEYEGLKLKAINKNETSNELKDENFKKIEEEFKDILTKVKEILKDHIKEVNLSATLIKEPSAIIVDSNDPTYQMQKIMLSMGQEVKEIKPILELNPNNKIVQNLKNLESEKLEKISILLFEEALLTSGMPSKNPGKFINIINEFLEKELL

SEQ ID NO: 679 - protein, 229 aa, Borrelia garinii
MLEIISLGGGVINSNQINIEFIKNFKNFVFKWLLENEKRKIILIVGGGKVAREYQDAYKKINPDFKVRELDEIGIMSTRLNAEFLCKVMNPLCKDKIVTNPLKNFSFKGKILIASGWKSGFSTDYIAVKFAEKFNKKDVINITNVNQVYDKDPKKFKNATAFKKLNWKQLQNIVGQKWNPGLNLPFDPIATKLSSKLGLTLYIVNGNNIENLEKVFNKNNDFLGTVIVK

SEQ ID NO: 680 - protein, 1147 aa, Borrelia garinii
MSFKAKFIHLHVHSDYSLLDGAAKISDIISKAKKCNMSHIALTDHGNLFGAIKFYKEAKKAGIKPIIGIEAYMAKTSKFFKKHDDLGKMSYHLILLAKNEIGYKNLLKLTSISYLEGFYYRPRIDKEDLEKYSEGLICTSACIGGLIPRLILGNRFEDAKNEILWFKKVFGNDFYLELQRHGIKDQDIVNERLVEYSRELGVPLTAANDSHYVNREDAIAQDIIVCIGTGAKKSDENRLKMETNEFYIKSQEEMCELFNDLPEALENTVRIAEKCDDFKITFPGPILPDYQIPIEFNTLGEYLEYLTLEGLKFRYKTLTSKIKDRAFYELSVIIRMGFEGYFLIVWDFIKFAHDNDIPVGAGRGSGAGSIVAYALRITDIDPLKYNLLFERFLNPERISMPDFDIDFCFEGRDEIIKYVTNKYGEDKVAQIITFGTLKPKAVVKDVARVLDIPFAESNELTKLIPDGPKVSLKEVLDDNSLKEYFTSKPVYKELMDAALVLEGMNRHASTHAAGIVISKTPLTDYVPLYKDYKQGSVSTQYTMDLLEECGLVKMDFLGLKTLTLIKNAENLIRSVNPDFKIKNIPDNDVKTFKMLGEGKSASVFQFESEGMQQILKDAKPDNIEDLIALNALYRPGPMQFIPQFIAAKKGVKSIKYPHPDLKEVLKPTYGVIVYQEQVMEVAKIIGGFSLGKADILRRAMGKKKEDEMDEMKVDFLRGAIEKGYDKEVASEIFELLKPFSGYGFNKSHAAAYSLIAYQTAYLKANYPQYFMAANLTNEINNNDKLSYYIEESKAIGINVLKPDINRSFKEFRVTDSGISYGLNAIKNLGEIVVDLIIDEREKNGKYSSFENFIRRVDDKVINKKFLESAIKSGLFDSLDQNRKTLFENLDRLIEVVSEDKNNKKLGQNSLFDVLKGQNPIHQNFNYQAFKEYSYSELLEFEKELLGFYVSGHPLDPYKKAINSFSSLNVLKDLATKKDSIVQFSGILNSVKVIQTKRNNAKMAFGVIEDFKGAIDIVVFTESYERYRDFLFESNVIGVIGRLTFNRDKFSIVVEKVVNIERLSEDKVKNIHIKFLNNKLNDLQLLNSLKESISNFEDNSGFSNVYFYLRENGKDLKLKMNSILNFVPDEDKLDKLRRCMIVEDVWVD

SEQ ID NO: 681 - protein, 264 aa, Borrelia garinii
MNNFLRKFFLFLLVFSNGYVAFSKNINVLIVTAMDSELEEINKLMSNKEEIVLKEYGLNKKIVKGKLSNRNVMAIVCGVGKVNAGVWTSYILSKYNISHVINYGVAGGVISDKYKDIKVGDIVVSSEIAYHDVDLTKFGYKMGQLMGLPQKFIANKNLVNKAKEAVKLKVRGSNAYSGLILTGDQFIDPIYIKKIIRDFKDVIAVEMEGAAIGHVAHMLNVPFVVIRSISDIVNKEENEVEYSKFLKLASFNSAKVVQEILRIL

SEQ ID NO: 682 - protein, 621 aa, Borrelia garinii
MKNHILYKLIIFLTTSVAIFAAADKLKEEDIFKINPWIPTFGIENTSEFRLDMDELVPGFENKSKITIKLKPFEVNPELGKDDPFSAYIKVEDLALKAEGKKGDPFQIDIGDITAQINIYDFFIKISTMTDFDFNKESLFSFAPMTGFKSTYYGFPSKDRIVRGTILARGTSKNIGTIQMGYKLPQIDLTFAIGGTGTGNRNQENDKDTPYNKTYKGILYGVQATWKPIKNLLDKNEDNRSVIAETPFELNFGLSGAYGNETFNNSSITYSLKDKSVVGNDLLSPTLSNSAILASFGAQYKLGLTKINNKDIYLILQMGTDFGIDPFASDFSVFGHISKAANFKKGISADPSKKTEDIFDPNGNALNFSKNTELGIAFSTGASIGLLWNKDDGEKESWKVKGADSYSTRLFGEQDKKSGVALGISYGQNLYRSKDTEKRLKTISENAFQSLNVEISSYEDNKKGLMNGIGWITSIGLYDILRQKSVENYPTATNSATDTNNQAGQSSESTQATIPNLTFEDAMKLGIALYLDYAIPIESISTEAYVVPYIGAYLLGPSNKISSDATKIYLKTGLSLEKLIRFTTISLGWDSNNIIELANKNTNNAAIGSAFLQFKIAYSGS

SEQ ID NO: 683 - protein, 476 aa, Borrelia garinii
MSIVIDSFKEISKIPRCSKNVKGIINFIKERSKKFGYSFKEDSVGNLVVQIKSNSNINMHPIILQSHVDMVCEKNESSLHNFETDPIEIVEEDGYLKGVGTTLGADNGIGVAMMLSIMSEANSFSHPDLELLFTVDEEIGLIGALSLDSKLCSGKSLINLDGEEEGYFLVGCAGSRLVEIVFSPQYSLATKKTKVEILLKGLKGGHSGADIHLDLANSLKLMFFALFEIKSNIDFEIESIFGGDSSNAIPNEAKALIFINDSDYDLLSKELKLFVFKVKSVYSLEDEFDIVVNKKEFSSVKVLDENSKSKLLNMGMGFLHGVQKVENYENKLIKTSLNFSSLFKIKDDYIFTFLIRSLFDSDKEYVFNHLQSIGGLSGANLRVIYDYPSWKSNKNSNLLKHLKEVYKEMYLEDANVSLIHAGLETGIISSRLGGIESVTLGPWIESPHTTRERVNISSTIRVYDFLKKSLERFQKF

SEQ ID NO: 684 - protein, 435 aa, Borrelia garinii
LVKIFMARLKGQKVKECSFCGLSVAELGGNVVISNGVAICPECSKICHNLFKEKLSNPLDSKSNGLPTPKQLKDHLDMHVVGQEDAKKVLSVAVYNHYKRILKNNKYDNGIEIEKSNILLVGPTGSGKTLLAKTLAAEMNVPFAIADATTLTEAGYVGEDVENILLKLIHAAHGDVSLAEKGIIYIDEIDKIAKKNENVSITRDVSGEGVQQALLKIIEGTIANVPPRGGRKHPYEDTIEINTQNILFICGGAFVGLENIVKNRINKSSIGFSAIEKKNIREDTSLKYLEMEDLIKFGLIPEFVGRLPVHSYLEKLNKEDLMRILVDPQNSIIKQYYHMFKMDNVELVFEKDALESIVDEAILKNTGARGLRSILEGLLKDVMFEVPSISKTKKVIVTKESVLNTDINPLILVGNAIKKPWAKELYEINLKYDKK

SEQ ID NO: 685 - protein, 802 aa, Borrelia garinii
MKSILNMIKNRKEDLPIVILKENVLFPNITLWVTFDNEYVINSIAQSMLEGRLILFAYPNESNYDEFGKGGIKNLCSVGTYSKLIQVIKVSKDVVKVLVECQSRVLIDSVSKKNDYLRAKVTFVPDVSGLNRELFTYSKFLKETYEVYRNSLSLKSYDSDNEPIDYFENPSKLVDIIASNSNLENSIKLELLQELNVKTRIEKLIVNLNIEIDLLDLKKDINSKVRAKLDKGQRDYFLSEQVKEIQKRLGKDENDYIDRLNSKDISEDVKSKIEKEISRLSKMQMNSPDANIIRSYIELILDLPWNENTLMKNHLSEIEFILRNSHYGMDEAKEKIINFLAVYQINSKVKAPILCLVGPPGIGKTSLVESVARSLSREFVKISLGGLRDEAEIRGHRRTYVGSLPGVFISAMKRAGKSNPVILLDEIDKINNSYKGNPESALLEVLDPEQNYKFIDHYLEIPYDLSNVLFVTTANSLNSMSKPLLDRMEIIKVEGYSYIEKLEIAKIFLIPSIIKESFLDKVYIRIEDEVIFNLIRKYTMESGVRGLKRVLTNLIRKLVRELLYKYSKDQIIKGNFYSPSSLIHGNNSLFTHDPDIPGIYKIININNYCNYVDTEYNLDLIKIDSSGFVYGLAWTNYGGAVLPVEATKFEKTGDIILTGSLGAIMKESAQLAYSIVKTYSSKLNFDIKESPEIHLHFPEGATPKDGPSAGITIATAIASILSDKKVPLDLAMTGEVTLKGFVLPVGGIKEKVLAAYRNGINKVILPKDNKKDYFKLPEEVKDNIDVKFVSSLEEVFDYLNII

SEQ ID NO: 686 - protein, 695 aa, Borrelia garinii
LFKILVLRKSKTLGVLQIIGLIILFYFSIISPTNLNADFEYKVVKGDTLFSIAIKYKAKLNDLKRINKLNVDNIRVGQILIIPSDSNLDQNITHKVNNSFNSLESVKKGVILYTTKENDTVESVSKLVGISQEEIIAWNDLRSKDLKVGMKLVLTEPDFLKPYVVKKGDSLSKLAQDFDISSKDILKFNFLNDDKLKIGQRLFLKKATESVNFHYVKKGETLGRIAYIYSLTARDLVALNGNRAVNLKAGSLLNVLKIVNNDLEKPFEKDLKIEEKTGNQFIYHSVAVGETLYSIARHYGVLIEDLKNWNNLSSNNIMHDQKLKIFDKKLLLDSSIIKSKNDSDIKNKVDSSANSSNKVQTIVNFPSSKNKKLNLNTFGTTVNQDLFDISSLVILDSKIPIFEVVGDFYYWYRPKKISQPSEFYSEDWHSPLNSYKKATQLFKSFEKLVNSRFNKGSRLKDKLIILDPGHGGLDPGAIVKSRDGLGNEVFVVEDEYVYDIALRLYVYLKQEGANVELTILAPDHLIRNSVFANNTFVNVKNEIYNDYDLNKNDTVDSWISGTPSGLKKRLVVVKNIVSKYKNIKDKDIAFFSLHADNSVGAPKSMGFYYQKDDEKKYDIHSKSVAEKITEGMKRSFYIKGQNLHVLRNNIVMTKLLIEVRNLAFPEEAWSIRSSKLRDQDSKILANGILKILENN

SEQ ID NO: 687 - protein, 562 aa, Borrelia garinii
MFRKLKKSKTYIIIISITKFSENNLLSIISNIKYLIEHKQLAYKIHWTFPIYFFEILREHEELNKWLFERFKTNKDIYMPGTYSGSPHEYMLHDEIHLDLYWALKNPFRSGYKDIFQNTPIMLYIYNIEKFRKKVTELYRKLNFNYTEGIRQSKNNKTYLIFYKNNCQYLYEVQKIDSPKSNVETLIYFYEIKESYDNQELKNFLLYLKALENNLHSIKIQNLEGSKLTAELLEIPKFNSLKEQEPIINFQNKRLKDYQINEKSLREFLINKQQEEIVKDLESIAPKNLEYNMEGNFTLSHDQYNIKFENGKLNKIKFKDKKVEFLNTSRTYLKVLSKKELIREASIESSFSFSNEKILGIKQYLAFNSATKSTIDFFIDETIPSFFLSIKIKWPSKINLDKKTLKKCNPDYLLEYSALEIPIFEIAKGTNLKITAKYSDLDTYEKIIITKNNPKGYINGTEFLISKGNDKNSNFFISFLNVEKQIIHTINYKIEKINSKKWLILNIGGSYNTVKIQDVINYSQTLNLMILPLNNNFDNKIKLNSKIKNLIFYTNIKKYENK

SEQ ID NO: 688 - protein, 545 aa, Borrelia garinii
MAKDIYFNEDARKSLLSGVEKLSNAVKVTLGPKGRNVLIDKKFGSPTVTKDGVSVAREIELENPFENMGAQLLKEVAIKTNDVAGDGTTTATVLAYAIAREGLKNVSSGINPIGIKKGIDHAVNLAAEKIRQSAKKITTKEEIAQVASISANNDSYIGEKIAEAMDKVGKDGVITVEESKTFDTTISYVEGMQFDRGYLSPYFSTNKENMSVSFDDAFILIYEKKISSIKELLPVLEKVLGTNKPLLIIAEDIEGDALAALVLNSVRGALKVCAIKSPGFGDRRKAMLEDIAVLTGGVLISEELGITLETVEIEQLGQAKTIKVDKDNTTIINTGNKEQIKERSELIKKQIEDSTSEYDKEKLQERLAKLVGGVAVINVGAVTEVELKEKKHRVEDALSATRAAVEEGVVPGGGSTLIEVAMYLDTIDTSKLSYEEKQGFEIVKRSLEEPMRQIISNAGFEGSIYIHQIKTEKKGLGFDASSFKWVNMIESGIIDPAKVTRSALQNAASIAGLLLTTECAITDIKEEKNTSGGGGYPMDPGMGMM

SEQ ID NO: 689 - protein, 248 aa, Borrelia garinii
MYKLVLVRHGESEWNKENLFTGWTDVKLSDKGINEALEAGLLLKQEGYSFDIAFSSLLSRANDTLNIILRELGQSYISVKKTWRLNERHYGALQGLNKSETAAKYGEGKVLIWRRSYDVPPMSLDESEDRHPIKDPRYKYIPKRELPSTECLKDTVTRVIPYWTDEIAKEVLGGKKVIVAAHGNSLRALVKYLDNLSEEDVLKLNIPTGIPLVYELDKDLNPIKHYYLGDESKIKSAMESVASQGKLK

SEQ ID NO: 690 - protein, 341 aa, Borrelia garinii
MKMKAKSILLFLLSTALFAQETDGLPEGSKRAEPGELVLDFAELARDPSSTKLDLTNYVDYVYSGASGIVKPEDMVVDLGINNWSVLLTPSARLQAYVKNSVVAPAVVKSESKRYAGDTILGVRVLFPSYSQSSAMIMPPFKIPFYSGESGNQFLGKGLIDNIKTMKEIKVAVYSLGYEIDLEVLFEDMNGMEYAYSLGTLKFKGWADLIWSNPNYIPNISSRIIKDDVPNYPLASSKMRFKAFRVSKSHSSKEQNFIFYVKDLRVLYDKLSVSIDSDIDSESVFKVYETSGTESLRKLKAHETFKRVLKLREKISMPEGSFQNFIEKVESEKPEESSPKK

SEQ ID NO: 691 - protein, 467 aa, Borrelia garinii
VQIKEIYFGPKILDDKNCNSKLTNFDFKVVSFELGPDHYLVDIMQVKEIRKSSNFTYVPNVKKYVAGLDNLRGEIIPIIDLRIMFNLEFNKKDLEDIMVLKNEDLLIGVIVDKINNVFSIDSSLIQDPHPVLSQDSLINYIKGVVDYNEKLYILLDVFKIFNYSEEEKVLKPGQNSAEKIDFVSDSDDLDVLDDCKGNFVTNNVFPKNSNNNENSTLKNISTFNLENIKKNLLKYEFNASLVNDVFLEKVGVKFNMVDTDCLPYDIFLNEFYSKSSGSLWGVDCLEEFQNEIVKNRLNFMDNLNSIFNVLEIGCGSGRETIALVNALSEYYVKPFKLTAIDNDLSKVVETSRLIFSESEIGISEIYRRNSFEQSPGVYKFKSEILNNVLFEYSDALFSDLPDNLGMVFLKDVLCFLDSKDQILILNIIASKTIKGALLVLGDNEELKNNDVFIKEKSAKYFNLYRKV

SEQ ID NO: 692 - protein, 753 aa, Borrelia garinii
MLVKLKYRFVGFLLLFLIFILLLFSMIFNFVLCGYLEDYYKQLTRAQLRRAAFSTQSFLDTLYVIINGAASNLALETISEFAISENRGKDFSESELVDLRKNSKFVIDSVKVNKKYRQYLYNFMTNLKNDTLFEEFAFFDFEGRIIVSTRHENNMDFGHSEANTNYFKKAIEDYKQNQLKFIGWYSNLSEGISAEVAIRSRQSEKKAFAIIVPVYSPEDKLVCGYLAGYLLNDVLADSFDRFRFGFYKRGNFVYIDSNNIAVNPFEEYNETSRVSSKFLNILKDVFSKPPLLSNIPTEVSVYTIDRILFSEMGEECYYALLPISSKLGEKGGVLIARLPYKDIYGVISSLKFQYILYSVLGIISLSIVLLMRIDRIISFRLNAIRVLVQDMVKGDLDKDYALDDGDDYFDELGMLSLQVVKMKKAISVAIASVLRNISYVNKASLEVASSSQNLTSSALQQASALEEMSANVEQIASGVNMSANNSYETEQIALKTNENSQIGGKAVEESVIAMQDIVEKVSVIEEIARKTNLLALNAAIEAARAGDEGKGFAVVASEIRKLADLSKISALEIGELVEDNSKVATEAGVIFKEMLPEIEETANLVKKISEGSSKQSDQIAQFKMALDQVGEVVQSSASSSEQLSSMSDKMLEKSKELRKSVLFFKIKDSKIENLEDGDYDFRLMDCPENSFKDENQDLKGNEISTLNGSRHSNYSLSIESEPSARTINKRVDPKKAIDIADKDLNFDDDFSEF

SEQ ID NO: 693 - protein, 317 aa, Borrelia garinii
MDLISFSVPGNLLLMGEYTILEENGLGLAIAINKRAFFSFKKSDSWRFFSKKKEIDDFSLIENRNDLVFKMFSYLSQNCFLNLESFAYDVYIDTSNFFFNDGTKKGFGSSAVVAIGIACGLFFIYNATNVVEKDEIFKYCLEAYRHAQGGIGSGYDIATSIFGGVIEFEGGFTPKYRQLGSLEFDDFYLMRGLQAVKTTASIYEYNKHRDSILDFIFKCNSEMKKLVLSVSTSKSALISSLRRAKELGLAIGEAIGISAALPPSFEHLQDQCDLIKALGAGNETFLVFRPNIKAFDLSKIIPIVLEHENIKFESEKC

SEQ ID NO: 694 - protein, 593 aa, Borrelia garinii
MEYLQTAASIKAKFDIVAIVEQYIKLAKSGSTYKGLCPFHAEKTPSFFVNSLQGYFYCFGCKKGGDVIGFLMDMEKINYNDALKILCEKFGIYYNDLKINRKSEKKSENKDMVSKIYSLNSRLINTIKFFLNKNKKALDYVLKSRAISKEVVDLFELGYLPFSIKDGLELHDFLVSKGYSSEILRKSGLFSKTNPKASILSQRLIFPIKDFKGNVVGFGGRDLDGKGSKYINLSETEVFKKKELLYGFYEGLNEIKSTKSVILVEGYIDVLAFFTSGIKRAVSTLGTSFSKEHLALIQRYANEVIFSFDGDDAGLSATLKAYQICLPFNINVSVVKMDFGLDPADLLKDKGEGSLQKILNNKCDAFEYLLDAYSNKYDLNKTVDLNAMINLFLNLINLSKIDTQKKIFLDKLSNKLGVGVTTLLKDYYRIKERFVVDNNKRNLYAHNDDSYERYLIVALLKNFSYFGIIRRNIIDSDLSDINARKIFMCFEDLFENNKDFSLMDLKRNLKDSYKVSEFFFEEILNSGFEIDDEALIHILIAIKRRKLDSRVLLCKKKIDGDSLVNAKIQINELMFLNMQRKNLKIYTDDVPGS

SEQ ID NO: 695 - protein, 225 aa, Borrelia garinii
MTNLIFKENTIYSSKFDDIYYNPKYGIEESFYTFIKGCNLDLELKTKENILIAELGFGTGLNFICLLKFIKENNITSKINYYSIEKFPLKKKTIMQISKFFVKETAYFKLMLKHYPKIPKKNLKLKITENVNLKILIGNAKIKIKEIPKNVEYWFLDGFSPKKNPEMWNNEIFNLISQKSSPGCKLSTFSSARIVKDGLKLANFKYIHIEKGFGNKRHMIRAQKN

SEQ ID NO: 696 - protein, 693 aa, Borrelia garinii
MKKMLLIFSFFLISLNGFPLNAREVDKEKLKDFVNMDLEFVNYKGPYDSTNTYEQIVGIGEFLARPLINFNSNSSYYGKYFINRFIDDQDKKASVDVFSISSKSQLDSILNLRRILTGYLIKSFDYERSSAELIAKVITIHNAVYRGDLNYYKEFYIESALKSLTKENAGLSRVYSQWAGKTQIFIPLKKNILSGKIESDIDIDSLVTDKVVAALLSENEAGVNFARDITDIQGETHKADQDKIDIELDNVHESDSNITETIENLRDQLEKATDEEHRKEIESQVDAKKKQKEELDKKAIDLDKAQQKLDFSEDNLDIQRDTVREKIQEDINEINKEKNLPKPGDVSSPKVDKQLQIKESLEDLQEQLKETSDENQKREIEKQIEIKKSDEELLKSKDPKALDLNRDLNSKASSKEKIKGKEKEIVKEKSKVSLGDLDNDETLMTPEDQKLSEDKKLDSKKNLKPVSEIERVNEISKSNNNEVSKSSPLDKPSYSDIDSKEVVDNKDVNLQETKPQAKSQSTSLNQDLITMSIDSSNPVFLEVIDPITNLGMLQLIDLNTGVRLKESTQQGIQRYGIYEREKDLVVIKMDSGKAKLQILNKLENLKVISESNFEINKNSSLYVDSKMILVAVKDSGNVWRLAKFSPKNLDEFILSENKILPFTSFSVRKNFIYLQDEFKSLITLDLNTLKKVE

SEQ ID NO: 697 - protein, 337 aa, Borrelia garinii
MTKPKISSINKEKIKILTILVLTSTFLLGIIFSNENKVARILEEKFFDFDLNLISKIETELEGTLTKLGKDWMLTYNKQNIPVDNKKVNALIRALDELQKNKLVSRDQKKHKELGIGENPSFKLFDNNNKLLTEIFVGKPGEGDSRLAYIKGSSENVYLTKNIFLSYKGNSYNTFSDTTLFQEKNTKLENLSFKIIRKLNKENENNINNNYEITTKDGLYFLNNQKMLKERPLNIIAEFKADGLEIDKSKINGYNLQYKIEVKWSNKSVNNIEVYFNKNEENDKDILIKKDKDEYYYMTSKWTFFDVFNLEKKIIEKDNISSNDNQEDEHEHHNNAD

SEQ ID NO: 698 - protein, 307 aa, Borrelia garinii
MINVEKVTKMYGSFTALLNINFKVEEGEVLGILGPNGAGKSTLIKILTSFHYPSKGNVKIFGKDIVEHSKEILQQIGYVPEKLALYPELSVKEYLKFISEIKGVKKIKKEIDKVISIFKLKEVEDKLISQLSKGFKQRVGIAGALINNPKLVILDEPTNGLDPNQIIEFKEFLRELTKESTILFSSHILSEVESICKRIIIVNNGVIVADDTKENIIKNKLKEIEIELIVLKKSENEKKIFNSKNDIFTLIQLEEHEKDLNISLKLSQGKTEEDLFSYIVKNNIILKAMIPKHESLETIFSKLTKER

SEQ ID NO: 699 - protein, 109 aa, Borrelia garinii
MKLNEYQEKAKKTAKYKNKKEELILTTLGLAGETGEVVEKIKKLGRDKNYIIDDEYLISIKKELGDVLWYLSTLSNNLGITLEDVALTNLKKIQKRHENGTINGEGDDR

SEQ ID NO: 700 - protein, 348 aa, Borrelia garinii
MTILPKIAKDIIKAYDQKILPNAILLLGEKFSSKKTSAIEIAKKILNEKNLTNPNLLIFANLDTIEAKAHLSTNSYKIINKYLEYIKTVIFTKCYFSNEKNLKKIEKNINYINSVYYKKEYNINIKNEFIKNIENINKELNRSITVYDVKKIQTWIFSEKEKPKVIYINEIENLSFNVHNSLLKILEGPPSNIYFILAARNKNKIPKTILSRLRVYNFTKPEKRLGIQIFKESFLTNKDITIEEYFASFYEEESKKIKKELIKILNIIKEKKSIFNLEEIDFIKDDQSFKIFLNELTINIRKDFLENKIDINQYLKYTEHLKNIYKYRPYNQNKKLIIENLMLNYEEI

SEQ ID NO: 701 - protein, 331 aa, Borrelia garinii
MNKLMLIAFATTNLLAQTNKASTDLKAEQSFNDKLSESVKLKEIANICPTNTNFLTGIGIVVGLAGKGDSLKQKDLISKILKENNTIDEISPNSIESKNIALVSVSLQVKGNAIKGSKHKACIASILDSKDLTNGILLKTNLKNKEGEIIAIASGIIKTNGKLKGSEYTLDSIIINENQNASYSYNIILEKGNYTLINRIHKILTSKKINNKIKSDNIIEIEAKNMGLLEEIENIKIETNPKVLIDKKNGIILASENAKIGTFTFSIEQDDQTILNSKTKTTIQVNSMKLNEFILKNSNNLSNKELIQIIQAAKKINKLDGELILEEINGS

SEQ ID NO: 702 - protein, 394 aa, Borrelia garinii
LRKDLIFLVLIVLIIASVVIFFIRSSKKELVYFELNTKNNISFLFLVEDLNKNLVSMQEIFINIKTGNLGFLDIPIHTGYEDLKGNISWFKDLYKKNSFTKFLSKIHTQLSHESDYYIRFQKENFVKLIDYLGGVRLLVKNPVKVYSFEDSILIPSGTSNFDGDKAYDYLRYFNDVNQFEERVEFFKEFFKKLLFQISDFGIENDNFFKIYSMIDTNLSEVVFKYIFKNYKINNDKIISINIKGQEEIFKDNHNNLIKVVLPEYGGAILKESVDKLNKELVNEGPEEIVKIVVLNGTKVAGLAKKTANIFNSLKFKVLNFDNADKNSYKNTLIINNSDNLEMAVRVGEVIKATNIKPISEVQTKRLLELDNLDINPDVIVVLGDDFNGRYVKSK

SEQ ID NO: 703 - protein, 639 aa, Borrelia garinii
MNGNNNMNNNGKSNNKKKNKNWILGFVVIFLISAIFMSYFIRGGESYKNVPYSTFQNYLDNGLVESVVIIDKNLIQFVVKGSNFAKSYFSTSIPYLDINLLAELKNKKVELSSGKSQASLIGVLLQTLPWILFFIFFFFIFRQTQGGGGKVFTFGKSNAQKYEAGKNKITFKDVAGQEEVKQELREVVEFLKNPKKFEKIGAKIPKGVLLVGSPGTGKTLLAKAVAGEAGVSFFHMSGSDFVEMFVGVGASRVRDLFDNARKNSPCIIFIDELDAVGRSRGAGLGGGHDEREQTLNQLLVEMDGFGTHVNVIVMAATNRPDVLDSALLRPGRFDRQVTVSLPDIKEREAILNIHSSKTKLSKDINLQVIARATPGASGADLANLINEGALIAARNNQDEILMKDMEEARDKILMGVAKKSMTITDRQKLETAYHEAGHALLHYYLKHADPLHKVTIIPRGRALGVAFSLPREDRLSINKHQILDKIKICYGGYASEQINLGVTTAGVQNDLMQATSLAKKMVTEWGMGEEVGPIFLVDDEAPIFLPKEFSKAKAYSENTADKVDREVKRILEECLKEASDILVKHKDQLVKLAKELVLKETLTDKEVRELLGFEVSKDECDLFVVESIAKEVEGEDKKG

SEQ ID NO: 704 - protein, 1466 aa, Borrelia garinii
MNLGFLRNKTFLLFTLPFFVFVLIIFSINLFVQIQIYSAKFFVVKYLESKFGFRIKYDKISPYFLSSIKIDGLELSLYGKDKILMDVVRVDLNLFKLILGDENIILNVYVKGSNLNFDINDFSISNDLNSSSAYDNENVILNKIINYLYRLNINLENININIKLNKNNSWLNFKVKNFSLSTVDEDFLFSSVVDFSAVKNLEINLPSERVDDGILDSTFYFEGKFKKGFEDGYVNFSFFEFKTKYFSLLEQGFQINYSKGNLKIFNLRRENFDFNLSYDKANGFIRLDALFFNVNLLDWINLNEDFEVYKDYFDISLNGQLAFSYDFKDKDLRYAGIIDSSLNVDTIGKEIQGLQLEIKGDDSIVSVKNAILKLKRGVVTYKGYYSLKDLLPIGRLNFKSSKILNFNDLNGYLDFKKDKNIFSVNSDNFSLGNLNFQNLSLKTYFLKDKIFIDYLIYLENKNSQISLKGDLKDEEFAFNLGIKELPLLFLKEVIPSSYLINFFPRTLLSGKYLNLVSDFNLNKFDYHKNRLKTFNFMVFSKLDNFNFIFDASGEKNFYKSNNFELQYNDHNLHSSLFIELFESGFNISTNFSYLDKNYPLHFNVNLKNKLIIAESPLGIKFNLNYFDPKIIYALNVNGFKVCNKTSDLLININFNGSYLGLNDDLKFKIDKFNIVKASKIPSYNFNFGFKGLYEYDKLHIFDVRLVNKLSNLQGYGQFNLKDNLNGSLNLFSSLNSERYFLGINSDEYGSYFLLKFQDLDFYNFNSLSLLEGKVNGNFLLNFKKNDLKNYSLSGYLEADKLTLLGIPVQLSLNLGLLDNKLNIYDIKAKRNKKEFLTGSLRYDLSSSIGVSNMVFSSNLFSYKFNANFRNFESRDEERFGVLKTKIEGEFSFRDIKYKDEFLSNLTVEFSNDFEKFNMTSIDYDLINVLYHYSSGEYSFILKDYLPLSFNSSGKIIKNKILGNVRDIKFDSKIITKDFLDSHSLFNIDNHFILYDLVLNGEFDIDGDLYNPNINGILNIQKGLVSTEYLRASRKFGGDRALEIFDMPVEIQDNKIIFSNEFNLDRYSKVFVSTSLNLNFLSDTIIDYYKIDISVTGRTGVPIKFDKIALSFTGYALGNFSIEGNADEIMFKGILNISNAWVYSLEGSIVNLLVNPFKQTKRVQTVDVNVRDFDILTDLEINFDSGVTFHWPDSNISFLQATISRGDKLLIKSDTKTDDFILKGDLNIASGFVNYNNKKFIFKSGAYISFNESRAKFDPWIKAEATNTIKDRNDKLLVTISIDSPLSLWKIEFMSYPSRTEQEIKYLLSGSTMGEAEGGLRSAGTNAAEMAIGIVSDIALDFLIQPIEDYMRSVLNLDLLSIKTDILKNSINSNFFKIGNPTFVDVLDNTSVKVGKYLVEGVFISGGFGFLKEQMTPFSKDLNFVINLGIEFDSPFFLVNYEFDYNFMKKGLDGIGNNIGISWKFKY

SEQ ID NO: 705 - protein, 177 aa, Borrelia garinii
VFFLILPLFFLLSFNVFSIDVIKIGIVDFDRIVIEVLNPQLKANLDQIKNRYQEQINTLNLELKNLRQLYDKSIADNDLDNARSFGNQYNLKVDELKRLSSLAKNNLEQQRLANINSLNNNSESLSKILHGIQYVAEINGFSLIMKKNNPYILYHNSTVDITDSVVKYLLEKDNKNP

SEQ ID NO: 706 - protein, 274 aa, Borrelia garinii
MLKILTKIIAISCLMVGCTSLSYSPPKQNLNYLMELLPDANLYAHVNLIKNRSIYNSLSPKYKSILGLISDLYFSYKKENNDFALLIMGNFPKDIFWGIHKNRNIESIGNIFTSPKWKLKNLNIYITPNKARTSITINQKDKTLKENNILTTKYIKEVEKNEMFFWIQDSILLLPNQIASSKNLIPFSSGTLSINSLNQKEYILKSLLTTNNPSILKILSKKLIPTILTSTTNLTISSHIKATIKDQNTVEIEFNIQKSSVENFIAKLASNIQT

SEQ ID NO: 707 - protein, 313 aa, Borrelia garinii
MKKNILATYILILVSLLSCNISGPNELGNKKTEKKGGGEGVLGFIEKIQEESIKGVEQHIEKREKQTMQTVSVKPVNVNRNFLYYPQEEIEIKEEALIPSTDEEKRVDKAISDGRLEFDKLVYDENKLKNESEQLESNFNNVYDEISKLKDAIQTEAHIVGRINHIIKTRPEKREYQNRVRQNQSEKRTLINLFNQLLEKRDDIEELHTQLDSGLSERASAKYFFEQSQKTLKDAITERLKNENRSWSKRSYGGNLTRKANREIDNALEQLKTSSSKIIKAMEIKGRIEQLLQEVKSLLASSRSKILTGFFKK

SEQ ID NO: 708 - protein, 172 aa, Borrelia garinii
LKQKIIIFTILAFLFNCTNKNNNAALNNDLDEESQKLQSKSNLVNDNRVEFSKTTPLEKLISGLNLNDAEKETLAFLINSLKEKLADSNIGVNFKNTGGDESKIEETVHKFLSDLKEDEIKEMLAKIKKNKDKKEKNSEELNTYKNTLAGGFDGMFNKTDSKTTFNNLKDAA

SEQ ID NO: 709 - protein, 273 aa, Borrelia garinii
LTLIFGCSLDNNSKIGKEGGRLIGGNESDRLGQKKRALDSMNFRSLSDGSSLVSDSQNHETLKALENKNKIIDYSQIQFLEGTKSISVYLWPVDIRWIKIKARDLFNERGNSIKELKGIKYSYLVSPVSGSYISYAMPLIIFETTCESDPIYSVSGFKLISKGSNINFNENKGGFLVGLPMSEKSVESGLVTAYPFGSNNAKKVVEAFTSLYSNGVWSDMIAEITIKFKKPPQTEKVYRISLDSKLFNVAMKKIVEKYPQIKSASFAFNSLIN

SEQ ID NO: 710 - protein, 190 aa, Borrelia garinii
VYSIVKEDHMDIKINKRNLSESIREEEQALIHYNKLKEKLNINFQKEIYCKLEAMKVLKEIKDKEYYKLDNYSTFDDFAKDYRLARTQTYKYLKIATAIEEGLIEEKYVVKNGINETIYLLKTKEGPSLRKSNQNPIKPLRFQLKKEESYSFYKKNAKLTSFLLEKIFFEEKDFLLKIIEEFETLRSKRK

SEQ ID NO: 711 - protein, 175 aa, Borrelia garinii
MTKYIKNLLKLTLIVGLLVACSLTGKARLESSVKDITDEIDKAIKEAIADGVKLNELEENKTGAKKGGPQIRDAKIRVINLSVKFLKEIEEEANILKDNVGMNKVDKDQLLKDMYDLMLNAAGSLQKLGLQEMIKTVTQAAEKTPPTTVEGILMIANTIEDKLKKIKGKQETNKK

SEQ ID NO: 712 - protein, 528 aa, Borrelia garinii
MIRKKILLLTLLIAAASSCKISKTKEDLAFGVGIGNEPSSLDPQFCSDKLGNLIINELFIGLLRGDPKTGGYRPGLAKNWEISQDNTSYTFHLRDDIYWSDGVKITADAIRGSYIMALEAEENLPNINLLTSKIKNAKEFHTTKLNSDEVGIKVIDEKTLEITLEQPTEYFLDMITNPIFIPIPTHVVKKFGNKWTTPENMVTSGPFKLKRRILNEEISLEKNKKFYDAKNVDINELTFVTINDARRIYSMYEHNEIDAIFNNIPLNLINELILREDFYSSDINQIGFLSLNLNAKPLNNPKVREALSLAVDRETLVYRVLDNNFKATRKVSPNINNYNYGKKLKPYNPRKAEKLLAEAGYPDGKKFPTITIKYSKNELGKEVANFIQSQWKKVLNINVEVETETWSSHVSNILKGQYEISVRSWQGDYLDPMTFFTIFETKNSHLSAYGYSNPEVDELLNKSEFEVDKKIRLEIFKKVEEIIIENDHPIIPIYSVAGNYLFRNDKWTGWNTNASERFALSEIKPLEE

SEQ ID NO: 713 - protein, 227 aa, Borrelia garinii
MKRISILSILLLLLLFSCKQYGDVKSLTEVATDLEDDNSFASGSVESKDQIIEKGPVLTSEEFERLEALKTFLKDAMGVNGREGDTKAEYEKSYKEFFDWLSKDVNRQKEFVSFFNNICGIITKAVDASKKRYNSNPKSLGFNEYVCYDIKTRTGDDLSLFFQKVADAFGTQEYKNKDEDDENNQKPEKCNEEIFKVIKRVFTESENNNELANLKNLNSYNLNSNNK

SEQ ID NO: 714 - protein, 379 aa, Borrelia garinii
MNANDKNKALNEYNLKNISEVIKNSLQIELDFKKELEAKTNQSIPPILEIEKIEPEKQEFSLKSESESLIPLEILEEANVVKSEEEIAKIQEKLLLIGASDEIIVQELDPNIQKSLNPTTIEFKILSTADEKTILDPTEEEINTNEKDKIFDQKKENSTLSGTEKTPIQNQFQKHDASLGKDGNLITKEYAEQVRKSLDKALNAIKSLEKSKDLLNLDAENLLKDPENSKNKTNSSISNNIDTKNIEKTKNKFLEELEKSELSFEDTKDPLGISTIKEVIDAANKWKEKENSSQINWNLGSKFHPTPKLYNESVAREYEVLAEKFTKVKNEYKNTKEQLKVQPKLTANNLSKIIDATKEFANQVRNLILLVENNHQKPY

SEQ ID NO: 715 - protein, 285 aa, Borrelia garinii
MIYKILTLFKITLLFSCSFYSPSNSEEATKELQSNLIAKNFSINKAENLNNLQQSQLSKTKKERIIKKFIQRLNENEELIESIESKIEISTQKTNQDIQKIEPIDHFGINKNAFPENTGASNIDLMLKKNEARRLFYSSLDYDENKIKKLISILAKTSSSSGYHYNIIDAFFWKGFKTQESLETVVNLLTKNELRRLILNFETKTVKDIQEKFEKLMQNKNAWIKIVEEVISKYGNNTASSSVDRIILGEMIRLGYEYKLNPDESMRITEKMKILLKACCDHIHY

SEQ ID NO: 716 - protein, 365 aa, Borrelia garinii
MKEIGISIYPNVSPKNKIIEYLEKSAHFGFTQVFTSLLYINGNEFNIFKELLNIANKNGMKPIIDVSPKIFKELEIDLSNLRNCPKLDYFKKLGAWAIRLDNTFTGIEESLMTFNDSDLKIQLNISNINKHIDTIMYFKPNIKNLLGCHNFYPHKYTGLSRTFFKETTKIFKHYSIPTAAFISSSNAEECARGKEKEGVPTLESHRSKDIETQAKDLFKEGIDTVLISNCFPSETELKKVSKVNRNVLELKADLNPKATPVEKEIILENLHFNRGDINSYRIRSTMPRVYYNNKKFPVHSPNEIKKGDILIDSSEYLGYAGELQISLKDTPNNSLINVVGKIVDEEIYLLEKIEPWEKFKIIENK

SEQ ID NO: 717 - protein, 533 aa, Borrelia garinii
MFDMKMLIKKLKAILFLNAILFISCFKENDGHKLAFKLNIGSEPVTLDVQLINDSVGSTIVSQMFLGILDGDPRTGGYRPGLAKSWDISDEGIVYTFHLRDNLVWSDGIAITAEGIRKSYLRILDKETGSSFVNIIKSTIKNAEEYFDGKVNESDLGIKALDEKTLEITLKSPKPYFLDMLVHQTFVPVPVHVIEKYGQEWTNPENMVVSGPFKLKSRVLNEKVVLEKNDKYYKSKDVVLDNIVFFVTDNSITAYNMYLNDELDAIFNNVPPDLLKDLKLRDDYYSIGINSTYFYSLNTKVKPLDNVTVRKALSLAIDRKTLTESVLNDSSIPTRRATPDYIDYSYKSNLNLFDAQMAKKLLVDAGYPNGKNFPLLKVKYNVNDRQRKIAEFIQNQWKKNLNINVQLESEEWSTYINSRVNGNYEIIRAGWLGDYSDPMTFLSIFKTENTSFSSYGYSNSEYDKLLIKSDHERNIFKRQEILKKAETIIIERDFPAIFINIISSSYLFRNDKWKGWEPNISQRFDLSVIRPIK

SEQ ID NO: 718 - protein, 404 aa, Borrelia garinii
MTNKIIKEALTFDDVSLIPRKSSILPSEVSLKTQLTKNISLNIPFLSSAMDTVTESQMAIAIAKEGGIGIIHKNMSIEAQKKEIEKVKTYKVQKTININKDINEQTTKMLLEKQHLEESKIYKNAERKEDFPNACKDLNSRLRVGAAVSIDIDTLERVEELVKAHVDILVIDSAHGHSTRIIELVQTIKNKYPSLDLIAGNIVTKEAALDLINVGADCLKVGIGPGSICTTRIVAGVGVPQITAICDVYEVCKNTNICIIADGGIRFSGDVVKAIAAGADSVMIGNLFAGVKESPSEEIIYNGKKFKSYVGMGSISGMKRGSKSRYFQLENNEPKKLVPEGIEGMVPYSGKLEDILTQLKGGLMSGMGYLGANTISDLKINSKFVKISHSSLKESHPHDVLNIP

SEQ ID NO: 719 - protein, 207 aa, Borrelia garinii
MKKNTLSAILMTLFLFISCNNSGGDSASTNPDESAKGPNLTVISKKITDSNAFLLAVKEVEALLSSIDELSKAIGKKIKNDGTLDNEANRNESLIAGAYEISKLITQKLSVLNSEELKEKIKEAKDCSEKFTTKLKDSHAELGIQSVQDDNAKKAILKTHGTKDKGAKELEELFKSLESLSKAAQAALTNSVKELTNPVVAETPKKP

SEQ ID NO: 720 - protein, 68 aa, Borrelia garinii
MLKLVNYLLLALLLCCTTIASLPDEPKPPIIQTLGALAKYEAQLSDYVMYLVIFLSKTKVKVNDPNYP

SEQ ID NO: 721 - protein, 1081 aa, Borrelia garinii
MKLDEIIIPLSMSISNNQKLDSIAETLKKIAEQKFASLDNLKSKLEKSTASGSNLEKALNKSSQNASKNFKSLANSVDSVNSKASGMKSIGKVLKSVGKGLGSVKNLANKTGEAFNQMLAAFAPIIIAVKALQAIGSTISGIFDGAMDALDEFNEEVSTFSDMLGNEELGKSLAESMRAFGDETLFTRDAIANATKTMLSYGATASEVEERIRMFGEAAGGSSEGLEKLAEVYSRVESSNQVNLEDLYALRDAGVDITDILAEEAGLAGEALYKAASDGQIGFEALNKALSKATSEGGKFYGNTAKEAKTLSQAQQQTAKMSEKLFLDIGKALEPMMIGFEKVKQFLLVAIMVPLTKVTTATIYLTTKLGELVVYLSGKWLEGVKMWFKAISTPFVKLFEGIKYVFNKLKELAKYVSSVFPERFKSAFEPIIKWFQKLLDMASKAYEKFKNIITFWKKSKKEEDTPSSEPERDKKVDPNAKTDYNKKIEQDYKKLQDEIFFAQREIYSKVGVEREKALRELEKTIKKKNQKFLNTYSKRFDELSDENKKILVGVEKAVNEFNNSNYDFVNEYQELLKEKESRERKILLTLPHTDQESALQKLNDEINGKNKAFVEKYGKSFETLNESNRKIVAELEKKVKEFEKAALDRSFVEAQKALQKNILALEWETMLLPAKERASAEKKMASDIQAMYKKFVDEHKSQFDNLNETNRNALKQMAEKAKDTAKSLYDKCLENLDKFTEFTGKILNQEVGEKAGSEGFDYAADSATKGLVDFGKNTLKAVGASFGPVGQAIAEIVIQIGEFLWGWFKGAEKARIKKIEEQRDKDLEELEKRSEIELKKLEEKFDAEIAMRKEKLSELDDEYSKEIEFLKQAQSKGQISGEEFQKRLHDVQTEYKTKKGIETTKLTKVEETKKLEVERQNKFSKLETERIKAQAEVDKVNTRMWSWSKSSDLEKAQKILDEILKRIATVKSAGSIEEIKLARGGARFVSNKPTYMPNSGVMSSEFGQPELVRITPAPIDENLRKLEAKIIAEEIAKLQKSQSSTVVNNFYYNFNGNVLDAEKLVRMLKSKEHLMTFRMAE

SEQ ID NO: 722 - protein, 142 aa, Borrelia garinii; identical to SEQ ID NO: 228

SEQ ID NO: 723 - protein, 396 aa, Borrelia garinii; identical to SEQ ID NO: 229

SEQ ID NO: 724 - protein, 260 aa, Borrelia garinii; identical to SEQ ID NO: 230

SEQ ID NO: 725 - protein, 874 aa, Borrelia garinii
LEEQDNTVQGIDLESPEITGQNPEISSAKEDTTQDCTSLGFDIVFYTDEGQIFELTPFVDISSIVLEEKIVDPSLKTASSNFSFSVSGLSEDFLNFLFFRNEDIFVKVSDNKNPVFTGILEKFFSRDLFNSTKSVSFTVNDYSSLLKIAFENPVQFPINFSPDWLFVYNPLAKELSLVHLIIGKTKLKDLIDDDASEAILDKVPAVIIDCGENVETILQALLYEFGYAYTFSPIGKLKILPIWKSEVINREIEICTIDAESYVMSKSSSSSYDSTKVIWREGKFQSKEESISKKRPLYSAPINVAGNDGKLYVAVLQKGVVYPDFADKVGSSVFQEYDPSWLDTVYKWDFKRREVWHDHYAINEHLAIISTHNLEARFSADSSIKLENKEYFPTKAKLWFRNTSSSQGSKYIYHFDIYGDVFYTIAQNVIQTDNADDFYSKKFEYTTRFIFSEESAVRLFEFLTNLRVKGHTIVNFRSMQNLNITDFVKLRPDNIGIDHFFLILSKKITNFDLDIKLYEYEGITWGDYTHYEYLTTSTKISVSDYLSGVNKVVIAPFNYNGAETFQFKADGFKDEDTLNTAIEFAKQAGLNKIKLLNGDFYIYDQVNLNNLEIQGKDEVTIRSTGFSKHIFTSEKSFKLSGISICQQPLSELYINGGTLNQEELSMYLEDKSFTHPHGVVFCSSYSVKENARSSVYVTDVNFVYIKDVTFRCALNNALYLKKVKKILLEDVDFDSANQGFEISDAKNITLVNTNIKSSKKESVASGYNIMIRESSFENNNNALKLSNFSSVKILDSQLSKNKGTALHLVDITIARLNNNVFVENKVGLENHSFDLIIQDTFLKNTLALDLSDSKGRIIDSSTYSENTKDKQEAA

SEQ ID NO: 726 - protein, 85 aa, Borrelia garinii
LGTLTEYVYKFLDEWIQKKYNAKLGFTIEKVDGLEYICKAKRYASLKKILTKIFKDYKDIFLGRLQKAPGVAAVPGSTGKGQGGS

SEQ ID NO: 727 - protein, 179 aa, Borrelia garinii
MKSVLTITNVTEEQIYKEFLRLGMEQLIAQDLSKRYYHNELTYRDLENLEKQFGIKIDNLVSKIDSVEKNLNTKIDSVEKNLDTKIDGIKNEFNAKIDGLNIKIENLNAKINSVEKNLKQDMSNLAQDLKKDIQINSKLLLEKLKVSNRIIILITVLVVPIAISSMANIVMSIIGSYLK

SEQ ID NO: 728 - protein, 1194 aa, Borrelia garinii
MKTNNIVKTNDPYMSLYKKLSKDFIKKESINKPKDFFILIKNKLSSIDDNSTEANIESLLRSIFEELNYSVEQQKVGQIEGVESRVDILLFENDKYRVDFNNKLEEAKKNNEPILTKDILLIAEVKRPSFSFNTKNKVKEAEDQLYRYLNQYQKHYGILSNGKIWRLYDKSKVLYGEKRYIEFDFSKIEEKEEYKKQEWFILFIYLIRKERYLKTSNVIEIEKEEISKEKEIIQKTLREILYERPDDSIVFKIAKNIYDKEFKVSGKEITQQILASILEESIIFILRIFFIAYIEDNDIFKKILEENKLYRSSISFRYFFYDENTKKKLGYKKIITIFNLLDKGSDAIKFPIFNGGLFAEDKVKYLNNESLLSISELEEVLVKILFFEEKNIKDEKFVEYSKLDPKSFGELYETLLEYDLRIADTTVHRIVEDEVYLIRTEEELENKKVNKVATYYKGNIYLTSRSLNRKKSGAYYTPDDLTDFMVISSIEEQLKTKAPLDIKIIDNSCGSGHFLISCLDYLTEKVWYQLDKFEDVKKELDKEYRAILKESEEYDVQDSISKELVLKRMLLKKCIYGVDINPISVEITMLSLWINTFIFGTPLSFIEHHIKVGNALLGYTKDEFFDITKKKFEGGFSLFKKRIKEITTILEDSYQKIKGINDTTKEDIEKSKKIYKEYEESEDTDNLKIIFSLLKLYSLSFDKSLNIEFSDIATVISLIENILRNKTSSEDKEKIEIIRKLSSYYKFFHYGIEFPDIQEGFDIVIGNPPWEKIKFNESEFFSKHIPSYRKLSIKEQNKIKEEILSKDTHPLNIEYNEEKNSISTINNIYKFDFKDYTSGGDPNLFRYFVTFNLKLIKEKGNLTYLVPSALFSESSSRSLRKHIFSKYKLNYIYQFENKKRFKDVDSRFKFVIFQFSNIKESTSSFKAKFMIQHSDNILKEITRDLKDNKDDPYKGIELNIDQIKKLSPTQESIIEFKNNEEFGLINKMFSQFSVFSEEYIDFKKGLDTSIKNRKSLLKEYDNENFIFLYCGANIHQFNSRFFENKNAKESSKFFWIDKEDLEKILAENNQHQTERIFYRAIARNTDIRTMISTLSPQNCYCVYSMYINYEKTPISIYKKLFIISILNSLAFDFLLRRFIDSNVLKSCLYQCPMPQPEEKEILSNSLYLNLAKNTSILIAKNDPENFKYLLYLDI

SEQ ID NO: 729 - protein, 250 aa, Borrelia garinii
LKKTKLNIIKLNILTTTLTLICISCAVNKIDPEPKSKTNKKENTKEFKNKSQNPDPLKTKNIEDIISKLKAIGKDLEAQQKQEKIEIDKIAAAQLDFLDTFKVGPRDLIVEENQMKMKRIIYSSLNYETEKIKILQGILEKLKQNPKAHNILGSFLYHISWGIQFNIEECLKGIRKAITDELHTLGQEKAERLLMQIESSLKLKQRFAKTLKETIEDYNKNLENIQTDAEKLVNHMNENYKEHDSLKPIY

SEQ ID NO: 730 - protein, 354 aa, Borrelia garinii
MKVKSKYLALGLLFSFISCNLFTRDEIKEESPGLFDKGNSILETSEESVKKPINKQGKSKVSRKQGKNKVSRKEPSIHSLKKGLCYKSNLLQKNVTLEEESLKTELLKEHSKTRKEKIQKQQDEHKGMTQVSLNSLSGESGELEETIERNEIDLTIDSDLRQKSALQTISGSNSISYTDEIEEEDYDQYYLEEEYDEYDYKEIRLSNRYQSYLEGVKHNVDSAIKTITKIYDTYTLFSTKRTQMYSTRLDNLAKAKAAEEATKFTKEDLEKNFKTLLNYIQVSVKTATNFVYISETHAKGKLENIETEIKTLIAKIKEQSNLYEAYKAIVRSILLMRDSLKKVKGAIEKNGIWY

SEQ ID NO: 731 - protein, 319 aa, Borrelia garinii
MELFDENYYAKAVANIIGEVKDPIMYKWFLPDQIEDVDLKMGYQRTVKWDTFLNANPTTIANEVNTISTIGFSSQVVRINYLKLQYKFRHLKQTAEKFYTADSYIGDINNNLLPFAQAYKLASSEIIKLINHFVLTGTVSIQKDGKNQKRLLPNMYGLLNMPDQVKEEVTSGDKDKMDKIFEKIEAGLSKLELGDEFSTPMMVIVDPATSLKLVKPYTIAQAPVMSCEKWEDVLIQTIKAINNREDVYIETSNLLKHQILIYPLNPALIKFKPSKYMLPTPNEQVDKDSTDIAHSYIDFVLGGLLATKKTILQVDIKQS

SEQ ID NO: 732 - protein, 87 aa, Borrelia garinii
MESVLATNITEEQIYKEFLRLGMEQLIAKDLSKRYYHNELTYRDLENLEKQFGLKFDNLDFKIDTVKNELNTKIDNVEKIFKMIYLF

SEQ ID NO: 733 - protein, 185 aa, Borrelia garinii
MSDITKIKQEFDKKVAEIKALMKNPQQDTGLLSNSVDFRDKNLIYSNSGGVWTSSKDKIENYPAKGYPYKRGVKLSFSEDGSSEFEVEAGGGDDLYGVCTDIDEFSGIATVIPITNNFMGYLTFKKNGNGLNPGDKLHFNQHGELEKTTGAQKTVNAIALSKVHKLTEDLHIVLASVFGNRAIKG

SEQ ID NO: 734 - protein, 259 aa, Borrelia garinii
MSDKDKRRLEYKELAKESKAKSKMLAASQGKGLVAKIAIGSALGNIIGNAMSKAAGGLLGFAKKAVEEKSKTNRAKLLNSAFFEKDERNTIMGTLKGMKGFERDLEKEEFLNQASVFKGTLRDLGMLNLTNLKKAVEFSAALKSSGAMSGEDAVKAVNSLLSGEGDELFDLLKKSGVGDKYIEDAKKAWQSGAEVDLESRITMLVEMFKDFKSFGITKKADTKEEIDSNLASAEQTLSNLTTTVLDPLLKFIKMVTGLS

SEQ ID NO: 735 - protein, 353 aa, Borrelia garinii
MNGKMRMFIICVVFTLISSCKYYASSEDLKNLEQNVKGKVKGFLDTKERIVSDDPTVYEIAEKLKEEELKGKKENKENVNLENKEKKEDSNKNDLKDNEDAKVLKPELEHIALENKKPKLEIAEKILKPEIPKLPVVPVVVKPVVKEKTEEEKARDKEYEDLRRRRIEQYQKQEEERLKRKAEREERKKLRESSGTFLERATKGKILTVTKQLDKIIRDIYSINPGSSFEERMEVSGKEVEDKVTGAIYDDITNNNSSGNSIYSEWEYDFDEESLLKSLIEELEKARTALRSKIKEGNENKNTVIISDIKGDLEKIKDKLKELKEYLQSNANKEEIQKLVKCSIDPNSDGCQE

SEQ ID NO: 736 - protein, 117 aa, Borrelia garinii
MNNLAYRTYNIESIKNEFLNIGFSEEAIDFVFLYNDNYNFEYLKEKIIDVEKNLQKDISNLDVKIDNVEKNLNTKIDSVNTKIDFVEKNLQKDISILDTKIDNVEKNLNTQIDNVSS

SEQ ID NO: 737 - protein, 227 aa, Borrelia garinii
MNKKMKMFIICAVFALIISCKNYATSKDLEGAVQDLESSEQNVKKTEQEIKKQVEGFLEILETKDLNTLDTKEIEKQIQELKNKIEKLDSKKTSLKTYSEYEEKIKQIKEKLKDKKELEKKLKELEDSLKKKKGERKSALQEAKQKFEEYKKQVDTSTGKTQGDRSKNRGGVGVQAWQCANELGLGVSYSNGGSDNSNTDELANKVIDDSLKKIEEELKGIEEDKKE

SEQ ID NO: 738 - protein, 144 aa, Borrelia garinii
MKIINILFCVFFILLNSCNSDNNDSFNKNNNREVKSIKKRDLSETEKAKSPEELLREKLSEDEKRHLDWLKTALTDEGEFIKFLGNDESKIKGALNHIKSELDKCTGKNEDHQKTIFKQVVEGALKEGIDSFADQASSTCGNGN

SEQ ID NO: 739 - protein, 184 aa, Borrelia garinii
MRILVGICIITLALLSCYLSDKQEQAVQTFFENLEMESYDKGPDEIITEGKFSNLRLYVAEHRLLVDIKKTIISLKDPNYRDVPPVPDYNEEYFNKFFLDLGSDRSKELIKLFGRLKNEQNNKFKHGVYWLYSCIRDLYSPDIKYSGEGGHEYWYNGREVFMPRPTIDQQYFKVKEVIEQYALR

SEQ ID NO: 740 - protein, 111 aa, Borrelia garinii
MQNNIISLGLNLLSSLTNIAKTDTNIDHNYINTFNKVIDFFYKTYMSTLKSMETAESTKILEEIQDILKYNIEIIEAISNNKSNKIISSLKVKRNKIMREYISILKRGENA

SEQ ID NO: 741 - protein, 231 aa, Borrelia garinii
MELVSTKNITEEQIYKEFLRLGMEQLIAQDLSKRYYHNKLTYRDLENLEKQFGLKFENLEFKIDTIEKNLNTKIDTVKSELNTKIDTVEKNLQKDIANLDAKIDTVVEKNLQKDIANLDAKIDTVEKNLQKDIANLDAKIDTVEKNLQKDIANLDAKIDNVEKNLKQNLDEKLKINNQFLLEKIEINNQLLSKNLDSSNRLITIMSIVLVPIAIAIIGPFVLSLINGFFKQ

SEQ ID NO: 742 - protein, 58 aa, Borrelia garinii
MNNLAYRTYNIESIKNEFLNIGFSEEAIDFVFLHNDNYNFEYLKEKLIDVEKNLRKDI

SEQ ID NO: 743 - protein, 173 aa, Borrelia garinii
MEIILNKRNLEVLNEAEEHYKKLKQRLKSSFQQEIYYKMEVIKILKEIKDNEYYKLDGYRTFEDFIKDYHLARSQAYDYLKIANAIKDGILEEAYVIENGVTKTLEFLRKSPNVLKKSKQNPIKPLRFQLKSQESYDFYKSNAKFTGYLLDKLFNNEKEMIKKIMKEYKQLKG

SEQ ID NO: 744 - protein, 180 aa, Borrelia garinii
LDIKVNKRDLSNNGNYIIADSALNHYNSLKEKLKINSKKEIYCKLETLKILKEIKDNEYYKLDGYKSFEAFSKDYRLARAQVYNYLKIANAIEDGVIQEEFLIKNGILETLIILRNKESKTIKKSKQNPIKPLRFQLKKQESYDFYKNHAKFTAFILEELLENQKDFLNKLLKKYKQLKG

SEQ ID NO: 745 - protein, 123 aa, Borrelia garinii
MFSCSGFLTLEGKERSSFTDKQRISVLETIKNHYNGDSEKISRVDKYFDRLEDSQRDVVLQLFSAGFDYINAKESEPTDSANRSANLAALKSDFESKLKKLNYTEQDFEKLADDLNKFVESSN

SEQ ID NO: 746 - protein, 130 aa, Borrelia garinii; identical to SEQ ID NO: 252

SEQ ID NO: 747 - protein, 388 aa, Borrelia garinii
VSKKVIILSISIMISILSLSCDLRKANAESGVDSIISFGKNYWNNLACKYLSGSEKSIFNALPKSKKSQVLDSILKEKNGEGAKQLLINWGIDFEMASSIAINIDKELVELKNSQVRLLDKDSYEVSSTVDLMIKSNDENHRLLGQNAYFDVENGSGDYNVLYSDFSSYDSSLDAVISSDSDLNNNDNANKNYLSNQNYTYQEYTDKQAQEIKERVKKYKIFKENVYKLSQTLRQSTFYAEELNTKLSGIDNKESNFILKVEDIKDIIRLIARIKMTQYTELSKKILDKNFSSIANDEESKRYALLYKDTNSTYLEVRKILGTILSKISSIVGGFKANIVDIKDSEKIKKAKEHAQGVLDILKLIDSGENVEAILTKAKEVENISNNK

SEQ ID NO: 748 - protein, 157 aa, Borrelia garinii
MRILVGVCIIILALLGCYLPNKQKQAAQAFFDENSPQSSDMGSNEIVTEGIFANLKLYKAEHRLLINIKETLISLKDANYNNVPPVGNRYNEENFNKFFLDLGSERSKELIKLFGRIKNDRNLFEKKVSLLFSCIEDNSSNGIDFRPINAIFEDGKE

SEQ ID NO: 749 - protein, 60 aa, Borrelia garinii
LLDIKKYLIFILLSNLINCNLFNKNKNSDQVNNIISSLDTNQKQAFKFFKDENLLMTAHL

SEQ ID NO: 750 - protein, 67 aa, Borrelia garinii
MLETKVNENNLYNELVRLGMNKILASDLATRFYHNEITIKDLEIVKLELQGFIKDEISIVKDEINAV
